United States Patent Application Publication US 2024/0050491 A1 - sequence listing, part 2

SEQ ID NO: 2 - DNA, 4215607 bp, Bacillus subtilis (residues 2,107,805-4,215,607 of 4,215,607)
  source 1..4215607: mol_type = genomic DNA
tccctgaagctcgctaagggttaatttattgtttcttgcttttttcgcaagctcgccgatctctttttcgattcctgcaaatgtcaggcgatccgcatcccgtacaaccggaacgacaagaccttcatcagcagcaacagcgattccgatatcgtagaattttttaacgatcaactcatcgccttgaatttctgcattcaacagcggatattttttcaatgcagccacgaccgctttcgtgaagaaagacataaagccgagcttcacttcattttgctcaaaaaattgatctttgcggcgttttctgagattcatgacagccgtcatgtccacttcattaaatgtagtcagcatcgctgatgtttgctgtacctctacaaggcgttttgcaatcgtttgtctgcggcgtgacattttttgcacttcaacaggtttgtcaaagctttgctgtgctttttgagcctgaggctgctgcttttgctgaggagccggttttgatgccggtttttcgtacgcttcgacatcctgcttgcgcactcttccaagcggatctccagttggaacttgagacaggtcaattcctttttctctcgcaagcttacgggccgacggagaagcgatcgttcttgattttgcttcagattgtgcttcctcgctcacctcttgtgcagctggttcagcctgtttctcttcttttacgctttccttgctttctgttttctctgtaggagcaggggcagaactttcacccgcgccttctgaaatcgtaccgataatttctccgacctggacggtatcacccgaatctttcaatacctcttgaagtacacccgattcttctgctgtcaattcaacattcactttatccgtttctagttcaagcagatattcaccctgttctacatagtcaccaggctgctttaaccattgggctattgttccttctgagattgattctgctaattcaggtaccttaatttccgccattttttcatttcccccttagtttttgcgagtcaagctatcagatacaatacgttcctgttcttttttatgaactgtcggatctccctctgcagggctggatcgtcttcttcgtccaatatattgaacgcttactccctctggtgcaatctctgtcaaatacgggctgatataaccccaagcccccatgttctgcggctcttcctgcacccaaacgatttctttcaggttcggaagttttgcaaataattctttgactccttttgccgggaatggatacagctgttcgattctcgcaatgtgaagccactctttaccgtcttctaacttattaaaatgatcgctaatgtctatagacactttaccgctggataatacaagtctggttactttttcatagtcatgagaaagtcccgactgttcataaacaggctggaagcggctttcgctgagctcctgcacttccgacaccgtatttgggttgcgaagaaggctcttcggcgtcataatgacgagcggtctgatttcttcacgaagcagcattttagcctgtcttcttaaaatatggaaatactgtgccgcgcttgtcaggttggcaaccgtccagttgttttccgctgcaagctgcaggaatcgctcaattcttccgcttgagtgctcaggcccctgtccctcgtaaccgtgcgggagcagcatgactaatccggatttttggccccatttcgcgcgtccggcagaaataaattggtcaaaatacacttgagcagcgttggcaaaatctccgtactgtgcttcccacaaaacaagcgtttccggtgaatgcacgttatagccgtattcaaaaccgagaaccgatccttcagacagcgggctgttatgaacagcaaatgatgtgctgcagtcagataagtgatgaagcggcacaaattctttgcccgtctcactgtcatgaagcacaaggtttctttgggcgaacgttccgcgctcggaatcctgtcctgttaaacgaatcggtgttccgtctttcaaaattgaagcaaacgcgagtgattctgccaaagaccattccacttttctgtcatcatcgaacgccttggcgcgtctttctaaaatgcgctttagcttgccgaaaacattaaatgactccggccagttgatcaattcgccattcagcttgcggagcacatcaaaatcaatcgaagtgtccacatctgggaaaccgtttgatacaggctctggaagttcaatttcacaagcagtgtgttcctttttagacggaactttctgatatgcatcctcaatgcgcttcgttaccgatttttcgatgttttgaacgacttcctcggtaaccacgccttcttttaccagcttttcagcgaaaatttgtttgacggtcggatgctttctgacagcatcatacagcattggctgagtggttgacggttcatccatttcgttgtgtccatagcgtctgtacccgatcaaatcaatcagaaaatccttgttgaatgtttttcggtattcgaccgcaaacttaacagctgaaagacaagcttcaggatcgtccgcattcacgtgaacaatcggaatttcataacccttggccaggtcgctggcatattttgtcgatctggattcagcgctttctgttgtgaatccgatcatgttattggcgataatatgaatcgcaccgcctacttgatacccttttaaagagcttaaattcaatgtttcagctacaattccttccccagggaatgcagcgtctccatggattaaaatggccagcgattttgtttcatcttgtaccgggtatccgctttgtgttcgcgtttcctgtgccgctcttgtgctgccttcaacaatcggattgataaattccaagtggctcgggttgttcgctaacgtaatgcgcgctgattttgtttcagcgtcttgaagctcccgattcgcccccaaatggtatttgacatcccccgtccatccgtagctgattccaatggatccctcagacggtacaagatctttgttcggcgcatgctggaattcagagaagatgatttcatacggtttgccgagcacatgtgccaagacattcaggcgtcccctgtgcgccatcccgatgttgacacttgtcgtgcctgatttgacagattgtgcaataatgtcatcaagcactggaacaagagcgtccagaccctcaatggaaaagcgcttctgcccgacgaatgtgcggtgcaaaaactgctcaaagccctctacttctgtcaatctttccagcacagctgacagcttttcagctgagttcttctggaacagctcgccagattcaatctttcttgtcagccactcgcgctctttgaagtcatgcacatggtcaaattcaaaagagatggttcttttatacgtatttcgtaaatactgaatggcttctaaaccgttcgaaatgtttttaggagcgtctttgcagatgacagacgcaggtattgcttttatttcctcttctgttagcccgtaatcggataatggaaaaagttcgctctttttctcatcctttctgagcggattgacggaagcgttcaaatggccataggttcggatatcttctgcaagtctgactgcggatgcgatcttttgaatcagatcggctgtaacacgtcccttttcttttgttcccgaggcctcttttatatcgcttggcggagcaccgagctcgtcgaacatttccttcaaatccgggtcaatgctgttcggatcctgggtatactgatcgtaaagctccagcgcatagccgaggttcggaccgtaaaaatcttcccaattcattcgttgtttcatactattttgaaacatttgaatattacccccaacttaaataatcaagtgattgattcactatcttgaaataactttcgaacgctgtgtccaaaattatgtaataaaaacgcttccaacgatattttaccactgtttgcaatttgattctaccttgattgttcacaaaatagtaaaaaacctttataaaaaacaaaaaatttaatcattcgaaaaaacaaacgccaaaaagcataggattaagggctatcctatgcttttatgaagcagttttttcagcagcggatacaaaacatccggtagctgatcaacatccgggacaaatatactgaattttccgtacatatcctggatcgtcttcatttgcgattcttctatttctgagttggagagaaaaacatttatcacttctattcctctttttcgggcttcgataaccgcctcacttgtatcaacgatcccattttgttcgtagccaaatgcggccggctctccatctgagaaaacaattaagaacttttgcgcctcgctgcgatgcagcatttttttcgtcatctgcctaattgcgtacccgtcacggttatcttcttctggctcaagctgcataatggccggtccagaatcttgtcttaatgatgattggaagggaataaccgtattgaaatagtttggctggcttttttcggttgcatcatttgtgtcctcccaaaaaccgacaatctgatgcggaaccgctaccgatttcaacgcttcgtgaaacagcacgattcctcgttttgtttcgtccattttgtcgaacatgctggcggaacaatcgaccagcaatgtaaaaactgcgtcgatttctgaagatggttcttgctttttgtagaacaggcgcggatttcgctcagtgaagtaacgaagaagcttattgttcagtctcccggcatgaaggtctgttctcggcaatgtttttttatgctccagcgttttttgaatcatttgtttcaaacgcttttgatacgattcaatcgtttttgcctgctgtttataagaaagctcttcttcactggttgccggctgcggttctttataaattggaaatgcatatttattttctttgccgtcagccatacccgctccgttcggctggtctttttgggactccagcgcttccagcttggaatagtctttccgtttcgtttgtctggctgatccttgaacagagccaagggcctgatctccatcgtcgccttcccttgaagcatcttttcctaaatctgattttgcgccgtgttcaatatcaaattgaaggaagcttttagacggtgcttctgtttcccggtgccatgtcggcatttcttcttcatggatatcctcatcaccgtctgattgttttggaagcgtgatgtcatcactcagcttcggcgcttttttctcttcttcaaataacggctgttctgcagcttttgcgtaatcaagctcaggcaaaaagaagtaggtgttcaacatgtctttatcgagtacctcttcaagtccgtccatgaggtcctcaacaattttcagaacctgccgtgtcgaatctgcttcatacacacgcaagagctgctgctcaataaacgggcgcatcagatcgatatcttcacgcatggatggaagggtctcgagcggcgattccgctgtgagcttgaaatagatcgcgcaaaagagcgcatcggtaaaaatgcttcgttccaaatttaaggtcagctgggttgagaaatgttttctgtacatgtcttttcgcttcgcaaatacatgtttcgtacccgggcgctcacgtttgatgcattcttcgatcctaatgtcttcaagcagcataaagagctgcttggcaaaacttttaaacgtaagatggcgatggatatcattcaaaaagttcgcaaactcatgcagcgagctatatcttgttccgactgaacgcaggtagacgtcgcttttcagacccgcttccatgtcctcagctgccctgtctttccaaaagtggctcatatagattttcttttcaaatggattgtaataggactgaacgccatactccacttctaccgcttcactcttggtgagtgttttggccaaatcagtcagcatcataaataaaaatgaatcaatcgtgctgtcgttaaatttgataaatttcatcgcagccccctcattcaaacagagtttctgcaatatttcggacagccgctttttcccgatcatcatcaagcttttctacaattccccgctcaatggcacgacgcggcggaatataagcagctaaatcacatgtatcgattaaagctctgatggatgccgcttcttcagacacctgtccgttattggcctgaacgatcaagtcagaggaaagcgtgataaatctgtcaatcaatttctcgtctttcaaggctgactgagacatgagcacttgtttcagcagctcgcctttaatataaggcacatcaatgatgacaaaacggtttttcaacgcttcattcagaggaacagttccgacatagccttcattgatggctgcaatgactccgaaaccgcttttagcccgtatgacctcgcctgtaaacggatttgtcatcatttttctgtaatctaatacaccgtttagaataggcagtgtttccggcttcgccatattgatttcatctatataaagaaaatggccttccttcattgcctttgtaacaggtcctgaaacaaactcgattgttgcctggccagattgattttcaatcgttttataaccgaccaatgcctcagcgtccaagtcgactgaacagttgacgctgtgcatcggtttatgaaaatagctggacaatgtttctgccagctttgtttttcctgaacctgtaggccctttcagcaggacatttttccccatggctaatgcaataatggcgtcaaataaaatggcttcatcctccgcctcatagcctgatgttcctataagcgattgaaactctggggaaataggctgctctttatatgataaaagcttttgttgtatatcttccggcaatgttaagtgctgtagttgagttgtcatagacagattccctttcctattcatattccattaacgagtatactaaaaaagcccctgtatgctcaatacaaaagggcctggatgatattactgcttctcgttatttcccaaaagggctccgcagacaatacgcgcaccggaattgccgcttgggtttgtcagataatcgtccgcttgttcatgaataataaatgcacttccgtcctcgtcgagaatatttagtttacttccttttttcagtgaagtgtcaggcgcattcattatgacatctacctttccatcagcaccgacttcaaggttcggcagatctccggcatgatgccccatcggattattaaagccgtgttctttgttcagtggattaaagggaccgcccgctgattcaaaatccggcctgacacaagaacctttctcataaatatgaaaaccgagagaagcacctggacgcaggctgtttgcggaaatatgaatatcgaggccttcatcatctgattctttgatctctataaaaccgactgctttcccttcacgattgaccagctggacatgatgaccaaacgctgacgtttcaaccacttttttttccggcacccggttaggagggtctggaggttttttttgtccgcatccggcaactcccagtgccgtcagcatcatcaacagcaagagacggtgcatactgtctcccccttgttttttctaacagtgtggtcaatcattgtctggtataaacaaaaaagcctataaaaggctttttgtcatactcatttttaaaaataacttcttgcgcccaagtaccgctgtttccaatacgaattgctgagattggaaatgtcgacgcccgatgagcttgcatgaataaaatcaccgccgcctagataaatccccatgtgagacgggccggatttatatgtggtaaagaagacaaagtctcctactgacggctggctgactttctgcatgacattccaataccctgccgtactcaatcttgatatagatgatacattattaatgaggtaataaatgaagccgctgcaatcaaaaccggcaggcgtgtttccgccccatcggtaaggcactccgacatattttttcgcttccgttatcattctgtcaatcttcgaacctatttgaatgtttgaccctgagttatcttttggctttgttggctttgtcggatttgaaggattagattttgatgctcccgaaatagtcagaacctgcccgatttgcaacacatccgatgataaattgtttttatcacggatgctttggacagtgactccgagccgatttgcaattttccacagcgaatcgcctgcttttaccttgtacgtcgttgtttttgagggattggagtttgacggctttttggaaccgctgtttccgttcttaggtgaactgcttccttttattttgagcacctgtttaggataaagtgtatctgatgttaagccatttaaggtttttaattcggctacagtcatatttaagctgtttgcgattttccacagtgagtcaccaagcttgaccgtatatgtactttttgaagaacctgaagaattggaaccgctgtttttctttgatccatttgatccgcttgaactgcttgtccctttgatcttaagcttttgccccggacgaatcaggtcactgctcaggctgtttaagcttttaagctcagaaacactcattttatgatttttagcaatcatccatagggaatcaccatatgcaactgtgtatgttgatgttttgcttgaattagatggggatgtcgtgctttttttgctgctttcaggaaccttaagactttgtccgacataaagcaccgttgatttcaatttgttttcggatttcagagctgatattgtcgtatcatactggcgggaaagtttccaaagagagtcaccgctttttacttttatcgtttttgcttccgcgggtgctgcggccatcgacgacccaacaactgcagaaacagccaagccggctacaatcttctttttcattcattcaacctcctaaactgtttttttgcaaaaacagctagtattttgtttccaaaaatggcacacaactgttttatcgtcaatttttcagcaagttaaacccttttcaaacatttggcgcagcattttcagcatcgttcgacctttaaaccttcaaataaacatctaacattttacataagcacgatatgtttttcgaaagtctaaggaactatttaagcgagggtaaaaatgatggttttctattgatgaacgaagcagtttctcctcctttcttgtctatttttctaatcaattctctatcggcgtgtcaaatcccttcctctgcattcttatgaaatggcaaaaagcctgttctttcgataagaacaggcttttacactatgcatttgctgattgagttttttgttttacagcttcaagaatgctgtcggctgcttttttagagccgcctgccgctttcagtgattgtccaatttcttttgccttttcagcatacgaacgattattcattacttcttgtatcgtctctttcagtaggctttcagacaattcttcctttttaattacttttcctgcgccgactttttctacctgatctgcgacaacaaattggtcgcctcccatcggaatgacaacgagcggggtttcaaaatacaaaccttcacttgtgctgttcattccgccgtgggtcacaaataagctggctcttttcaagatctcaagctgagggacatacgggcgtacaatgaaattctccggaatgtcgtttaactcacttgttttaatatgcttgccgatggaaagcacaactttaccgtcaaagtccttacacacttcaaggcattgattaaaaaactgcttttgattattaaaaatggttcccattgaaataaacagcacgttttcattgtcaatctgatcaaatgggaaatcattgtttccggctctttctgtaatggaaggaccgacaaatacatatcgctcgccaaattgctcagccagtggctgaaatccccttgatgtaaagacgattgtcaagtcaccatcagctaaaaaaacatcaaatggcttcttgatctctgcttgaaaatcagcatttaacgtttctgcaagctgctggtatgattcataatgaggcgaatcttcaagtgatcctttcatgtacgctcccatcatttccttcgcaaattcctcattcatcgcaaaggttgtacacaatgaaaatcttggcagcttcagcatgttggcaatgactttacccgcgagaagatggtgatcatatatgacataatcatacgattcatgtttgacttcctcataaatatgagtcgcgatatccttacaggctttcaaaaaagcgcagagcatttctgtgaaatctctttcttcatcgccggttgcgtttttcccgaagtaatctcctctgaaatcatgatactcacgaaactctatatcaagagctgtgattttttctttatattccttcactgcgtagtacgtaatgttttctccccgggatttcagctccttcatcacaccgatagagggattaatatgcccttcaccggggaaaccgatcattaatacattagccatgcggcagcacccttcctttgagaatttatgtaatattttatacggtactataaatgcataaacaggtaaagtatttcacttaattaatattcatcatatataacttttctaccagtttatattccctgtcttcaagacaaaaagcattcagcttgaagcgaatgctttaataaagatgcgaattcagtcattttgtctcatgataggattcttaatcaggccctttttattatttttacgttcttggtgaaattaacggatataatacaccgtctttggcaaacgacatcttccctgtttcctctgaaaccacgagcaccagtgcatccgtatagcccgacataccaagagccgcccggtgccgggttcccaaatggatatccacttccttcgtcgtcagcgggagcacattggctgctgacacgagtttgttttccctcactaataaagcgccgtcatgaagagggtttccgggaaaaaagatgctttcaattaatgaagagctgatctcggcgtgtagggaggtgcctttttgaataaaacgttcaaccgggtctgctctttcaatcacaattaaagctccatgcttatgttccgataaggctttaatcgccttggccagctcaataaatgccggcgtaaattcctcaatgtatgattgcaaataaaaggaggatgcaatcccctgcatgtcctgaaaaacgtgccccaaatcatctaattcacaaaggagacactggtctttttcgtgaagcgttttcaagattagagatgcatcacctaatatttgctctaagtacacctgtattttccccttgaacgcattttctgatatctgctcatagcgcatagccttcatctcctgtttaaatttccaacttttcacgaatgcttatcttattgatgcacattctattggtaaaggagggatgtaaagaatggaaatcgaaagaatcattcagtatatttgcacctttttaggcgtgatttcgctttcttttatttatgcccaaatgtttagaaaaacgaaaccgacaaaaaaagaataggcccggcgttcattgctttttatacataaaatgttataatttctctcgttatgaaaaagaaacggagatcaatgtatgaaagaaactcaaaacgcccgggaaaaaatcaaacagctcttgcacattttaataccgatattcattacccaagcggggctttctctgatcacttttctagatactgtgatgtcagggaaagtcagccccgctgatttagctggtgtcgccattggctcaagcctttggacccctgtttacacaggacttgcaggtatattaatggcggtcaccccgattgtcgctcagttattaggtgcagagaaaaaacagaagattccctttactgttttacaagctgtatacgtggccgcgcttcttagcatcgccgttttagtgattggatatgctgcagttgaccttattcttggccgattgaaccttgatattcacgtgcatcagattgctaaacactttttaggctttttatcactgggaattttccctttatttgtttacaccgtgttgagatcattcatcgactcattaggaaaaacgagagtcaccatgatgattacactcagttctcttccaatcaattttgtattgaattatgtatttatcttcgggaagttcggaatgccggcacttggaggtgtaggcgcgggactggcatccgcgttaacttactggtgtatatgcatcatcagttttttcattattcataaaaacgcaccgttttctgaatacgggatttttcttaccatgtataagttctcttggaaagcatgcaaaaatttgctcaaaatcgggctgcctattgggttcgccgtgttttttgaaacgagcattttcgcagctgtcacgcttctcatgagccattttcatacagtgaccatcgcgtcccaccaggcagccatgaattttgcgtctcttttatatatgctgccgcttagcgtgtccatggctctaacaattgttgtcggatttgaagcgggtgcagcccgttttaaggatgcacgctcatatagcttaatcggcatcatgatggcgatcggcttttctttgttcactgccgcctgtatccttttattcagagagcaaattgcgggcatgtacacttctgaccccgatgtgctccggctgacacagcactttttaatttatgcgctattttttcagctttccgatgctgttgccgcaccgatccagggagcactcagagggtacaaagatgtgaactatacgcttgcggccgcttttgtctcttactgggtcattggccttccggtcggttatatggtcggtacgtttacaagcctcggtgcattcggctattggattggattaatagcgggactcgccgccggagcagttgggctgtttttcaggctggcaaaactgcaaaaacgttattcgcaaaaacaacacatttaaaagaggtgatcaatcatggcaaaaaacaaaaaattattcgagtatctttcccagcatgcggaaaccatcagttcaacatggtatgaaacaatcgaggagactgatcccaattccatttatgcctcaacagaccctgttgtcattcacaatttaaagagccagaatcttgcctttaactataaaataaaccgtatttttatagatgatgaggacgtatacttgcctatactgaaagaatgggcctttgaagtcacacaggatcaagagcatttaaaaactcctatccactatattattcgggagtttgtcagagtgagagatttatatgtttcttatgtgaaagaatttgtccatctcaatcagaatactgtgaaaagcgaagaagccgaagacctgtatcacgcccttataaaagcgtttgatcttgtgattcatatttttatagaagaaatgtacaaaaacacaagccttcagcttcaggcccaaaaagatatgattactgaattgagcgctccggtcatcgtgctgtttcacagcgtcggactgctgcctttaatcggagatattgatacagtccgcgccaagctgattatggaaaacacactgcatcaatgtgcgaaaaaaaaggtgacacaactgtatattgatttgtcaggagtagctgtgattgatacgatggttgcccatcagctgttcagtctgattgaggcgcttcgtttaatcggtgtttcttcaactttgtctggaatccgtccggaaatcgcgcaaacagcggttcagctaggtttgtctttcgaaggtatttccttgagatccactctcgcttcagctattgcatcggacttaaaattaaaaaaggtataaggcttaaggccttatacctttttgattaatcattccattgatacgtccaatatatttcttcttcaaaccatgttgccataacaggttcattatttttcaatttctcttcaagctctctgagcatgccttctgtttgtgtgcggtgagctcttaacgcattcattttaatatcagctacttctttgatatcaagtacgacatcagcttcgccgagaacctcttctctgttgcgggtaatggccatgcagattgtacgcggacggtcttctttctttttgcggtataatgcacggataaccgcttccccgcatgcatcatggtcagggtgcacaccgtgtccgggataaaatgtgacaattaaacttggttttacatcatctatgatctcttccatgatatcagctaaatactcatcgtcttcaaattcgagcgttttgtcacggagtccaagcatccgaaggtcattgatatccatttctttgcaagcgttgatgagctcttgttttcttagcagcggcaacgtttcccgattcgcgaaaaatggatcgcccatatttctgcccatttcacctaaagtggcgcaggcatacgtaacgggaatgtctttttttctgtttaaggcaatgaggcctgccactccatatgattcatcatcagggtgaggcaggattactagtacatgttctttcattattattcacccttttctttaaactgtgaacggtttttcgctgatttgcagagaaatagccagtttaccgcccggcaggtgtcccgccattaataaacggttttcttcatctaccgtgtattcagtcaagccttcagcataaatccagccttcttctgttttcaagccaacgcggtaaggcccgttgcctttgatttttgcctgatgataagtgacttttgcattgcgaatatacgcaacaaccgtcatgttcttttcatttaagtgcgctgaataagaacctgtggtggtttctaaatggatatatacagggcggtccgcatatcgttctaaagatgcttgcacatcttcttttatgatcgctttcatgattgctcccctctttcttcttttaaatactctgcacgttctgtatgtaatttgaccagctgatatttcacagccggttcgagctgtgaattcacaatgcgctgaatcgcggcaaaatatttttccagcatcggttttcggagtcttggatgtgttcgtttatccaagagctcaagatcaatcgcctctgctaccgcttctgcgtcatcatgtgcgagagatcggttattccaaagtgaagcataggctttcactatctctttatcattgtccatcgtcttgctcctttatgtcttacatacatgaaatgattatacataatatatgcatcagctgaaaagccaaaggcctcaatggctttttgacgcccgtttccacttcacttgtgaaaacgtaaacaagagcagcgcagcccatatacagctgaatgtaaaagccttcgagcttgaaaatggctcatggtaaacaaacagcccgatcagcagggtaatggtcggcgcaatatattgtaagataccgacttgatacagtggcagccgtttcgctccttccgcaaacaataagagcggcaaagccgtaaacacaccggccaaaaagagaagcagccacgtccctccgctttctgcacccgctggctgaacatgtccgctgaacagcaaataccccaatgcaatgggcataatcatgaatgtttccagcgttaaaccgatggcgctcggcaggcttgttctttttttgcttaacccgtacagcccaaagctgaatgcgagcagaagcgcaacataaggaatggagccgtattggaacgccgagatgatgacaccggctgccgcaatcgaaacggccactaattgcaggcgattcagtttttcctttaaaaataaaatcccaaggagcactgatacaagcggattaatgtaatagccaagactagcctcaagcaaaaagccatggttgacagcccatatgtatacaaaccagttgatcgaaatcaggatagaagcaagaaataaagagaggatccctccgttctttttcagagagcgcaactcctgccatcctattttccattgccgcaagaaaaaaagtacgatacacataaaaacaaaagaccatataatacgatgagccaaaatatcaagagccggcagctgttcgagaagcttccaatagagcggaaacaggccccacatgataaatgaaacggctgtgtaaataacgcctttttttgtttctgcatgttgcattgatatccctgcctttctttagagcatcttatattatatcacgtgaaagatctggtgggcatatactattttgtccgtgaagaaaggatgtgaagacaatgtttgagtggaacaagtactttcctttccacaatcaattttctaaagaagcattaaaaaaagctgatccgaaagaagttgaaacgtatgtcaatcgtgtgatggaaagtgtgttcggcagtgattatgcggctcaatttcctttccgcgatcctctcccccaaaaagaacatcccgccaaacctgatgcaaaacctgatgtcaaacctgatattgatatattcgaaacagcagaccatgtgtttgtaaaggtgccaatcagcgaagaatggctggaacaagtgagaatcaaacacacatctcacgaattatggttggaaaacctcccaagagcagatcatccgaaaaaagtaaaccttccttgtttagtcaaacgcaaaggaacaaaagccgtctataaggatggccttctggaagtcatgtttcaaaagcagcaagactacaatatgtccgaggtagaaatcatccgataaaaaacggcctgcaatcgatgcaggccgttttttattaatagaagccgggatatcccccgtatggcacgccggcaccaaaaccgtacggtccgcctccatatccataagggccaggaggataggcatagggacgagaatagttaaacagcgcactcccgagaaaaccgcctaataaaccgccgactagaggagcgccaaacaaaaaaggactacgcgccggatatccggctggacctgggattccgcgtaaatacgaatgatgagggtacatgattttttcctcctttatgtctgcctatacgtaaagtattcagcaaggaagaaaaacgattgggctacggactgtctatgattgttacatcacaagccctgccaataacacacagccgagccctgtaaccgaaagaactgttgtaagcagcgtccaggtttgaaatgtttctttcatgctcaagccgaaaaattcctttaccatccaaaatcctgcatcatttacatgacacgcaatgacactgccggctcctgttgcaagcaccattaacgcagggtttacactgccagcctccataagcggagctgccattcccgctgtggtaagcgcagccacggtagcagagcctagacacagacgcagaaccgcggcgatggtccatgcaacgaatagcggcgacatgtttgtttgacggaaaaaatcagcgacataatcgccgactccgccgtcaatcagcacctgtttaaacgctcctccccctcctatgatgagcagcatcatcgcaatttgcgaaattgattctgaaatagatctgccgatttcctgcatagatattttacgggcatatcccatcgtatagagtgcaagcaacagcgaaatgagcattgccgttcccggagtgccgataaattctataatgtcttttccttttgaatgttcactcaataataaagaaaaaattgttgccattgccataaagataaccgggaataaagacgtgacagcactgatcgcaaagcccggtgtttcatccagctgaaattctttccttggtcctaaccccgataggtttccatgcttttgatacgcaccaggaaaccgtttcatcgcaaatttattaaataaaggcccggcaatcacagttgtcggaacagcgatgatgattccaaaaagcagcacctggccaatatgggcaccatatgcaactgagatagcagttggagcaggatgcgggggcaaaaatccgtgagtaacatttaaggcggcggccatcgggattcccagatacagaaaaggcatttttaattctttagcaatcgcgtaaacaatcggtatcaacagaacaagaccgacttcaaaaaatagggcaatcccgatgataaaagaggcaaccacaaccgccgcctgtattcgtttcctcccgaatttgtcaatcagcgtaatggcgatccggtagccgcccccagcatctgagacaagcctcccaagcatcgcgccaagtccaaacactaaagctaaatgccccagctgcccgccaattccagtctcaattgaaagaacaattttattgatatccattccaagtccgatggctactaaaaatgaaacgacaatcagtgagacaaaggtatttaattttactttaataatgagaaataacagaatcagcactccgacagctacaattaaaatcggcatggtacccctccaaaagtgttttatatgattctcgcgacaatgttttggcgcttttcatgcctagatgaacagaaagcgctttcattaataactaaaaacgtcttggttatatgattgttatcttttgatcaactaatatgttcatactaatctcctaatcaatgactgtcaatcgtttttatgagcttgtctcgattacctaccgcctaacccaatgatttattagttatatgttgattaacttttggttatatgttatgttttttaaagttgactgccaatcattatatctctccattgtctggaagcaaatgagacaatatgagaacagacggataacaacttcataagaggaggagtacacatgccattattgcgttttgatgtaattgagggccgtgatgaaaaatcgctgcaattgttattagatactgctcaccaagcgatggttgaagcatttggtgttccggaaagagaccgttatcaaattgtccatcagcatcccgcaaacgagcttataatccaggatgcgggattagggtttcagagaaccaaggatatggtcatcattagcatgacaagcaaagcaagaaccgaaagccaaaaggaaaaattgtatgctctgcttgctgaaaggctagaaaaaaaatgcgaaatttcccctgacgacctcatggtatctattactgagaatggtgacgcagactggagtttcggtctcggtgaggcgcaatttttgaatggaaaactataagatttcgtctccccacaaaaaaaagaagagagagctccaaagaagctctctcttttttcataaatgcggaagtcatcagtatagaagcatccagcaatacgaaaaacctggatctccttttatatccggtttaaatgccaattggaagctgactgggttttggctgaaaatataaaattttgctgatttgcataataagatacatcataatccccatttacaataggttggatgttatagcttattgatcatttcctattttatatatccccttcatatgcacatgacatttttgccaatccggaaatatcagtctgacaaatataaaaagtcatgtaaacgggtgtgaaccgtacttacatgactcaccatggaaacaaaggctctttttcaggtgccgctttccttatttctcttcttcacacactgtgtcaccaggctcgcaaaattgatcggcccatgcctgcatttcttgaaatacagcttgaagcgctgttcctttttcagtcagcgtgtagatgactttgaccggcgtttcagggagaacctgccgttcgacaatctcgttttgttcaagctccttcaagcgctctgccaacattttttggctgatcatcggtattgtttccgttatctctttaaaccgtttcggcccatccattagcacatggatgatcagaccgttccatcgttttcccagcaatgagaatgcggattccattttagggcacatcgtatttcccataagtcttcatcccttcatctattgattgacatgtattcaatgatccattacaataatctttcaagttacatttagtaagcttctaacttttctattatcataccacgtttatccgaaggaggaaacactatgacgaatactctggatgttttaaaagcacgtgcatctgtaaaggaatatgatacaaatgccccgatctctaaggaggagctgactgagctattagaccttgccactaaagcgccttctgcttggaaccttcagcattggcattttacagtattccacagcgatgaatcaaaagcggagcttcttcctgtagcgtataatcaaaaacaaatcgttgagtcttctgctgttgttgccattttaggcgatttaaaggcaaatgaaaacggtgaagaagtttatgctgaattagcaagccaaggctatattacggatgaaatcaaacaaacattgctcggccaaatcaacggtgcttaccaaagcgagcaattcgcacgtgattccgctttcttaaatgcttctttagctgctatgcagcttatgattgccgcaaaagcaaaaggttatgacacttgcgcaatcggcggatttaacaaagagcagttccaaaagcaatttgatatcagtgagcgctatgttccggttatgcttatttcaatcggcaaagcagtgaagcctgcgcatcaaagcaaccgtctgccgctttcaaaagtatcaacttggctgtaaggatatgaaaaaccttagtccgaaatccggactaaggtttttttatacaatcgcctctttgtaccattcacgagcctgttcagcttcatgctgagtcagctgatggcccccgtcctgccagtaaacggaggctgatgccccgctgtcacgcaaatagcggtaaagctcttctgattcttccttcgtgcaaagaggatcgtatttcccggcaccgataaaaacagggagccccgccatatcaggcagctcgataccccgaatcggaaccattggatgatgcagaatagccccttttaacacatctttataatgaaaaagcaggcttgccgcaatgtttgcgccgtttgaataaccgactgcaatcactcggccgcgattaaactgatgcgtttctgcagcctcgtcgataaaatctttcaattctcttgtccgcaccacaagatccttttcatcaaaaactccttcactcagacgtttgaaaaatcgcggcattccattttcaagcaccgatcctctgacaccaagcaaatgggcatcagggtctataaaccgccccaatgaaagcagatcgtgttcattaccacccgtgccatgcaacagcaaaagtacgttgtcagatgttcctttctcataaatatgcttcattataaattcccccttttaaagttcaggtaaaatgtctgtaatttgttgtctatgtttctccagccattcaggcagttttaaggaagtccctagctcagcaaacgtttcatctgtcataaagcccggttcatctgtggcaatttcaaataagataccgcctttctccctaaaataaactgatgtaaagtattccctgtcgagaatttctgacgaaggcagatggttttcagcaataatcggcagccatttcgcctgttcctttttcttagtccgaaacgctacatggtgtaccgtaccatatcctccgactcctcttttttcaggatgtaaatggacatcaatgacaccgccgaccgccgctgaagatgccagtctgacaatctggtcttcttcggccactttggtgtatccaaagctttccgttaacaattgtatggtcgcctgcgggtcgtaggaatatagcagcacacctttcattcccgtaattgcttcatttgttgtgatcccgtcaggcgtccactcgcttttgccgcttttcgcatcctccatgatcgccagcggaaggtcttctgtatcatcaaaaataagacctttttcaccaaacaacgttttttcctctaggctcagcccgcttttctcaagacgttccttccaaaaagacagggagcctgagggaactgaaaagtacacccggcccgcttggccttttcctaccgttccctgtccgcttccttggaacggaaaaaaggtcattattgtaccgggatctccgttttgattcccaaagtaaaaatgatacgttccgggatcatcaaagtttactgtttttttaacgagcctgagcccaagcacttctgtataaaatcgcaagttttcttgcggatctctggcgaatgctgtgacatggtgcaatccttctgttttcattttctcactcctatttatctcgatttcaagatatttattattttaaacctttattgaaaaggatgcaaaccatgtgttttgattaaataattgaaaaaatcatttttttctaataattatcttgtgatcttttcttacaactgctattatagtgagcattatcatgtttcaggaggaaagtaaatggttaaaaaagcacttattgttattctcattcttttgccattcgttcagctcgcgcttttgccgcttgtgaatcgaatagaaccgattatgttcggcctgccgtttttccacttttggctgctgctgtggattattgttacgccgttatgctcgtttggcatttatcagatgcaaaaaaaagatggaggacttgaataatgcaagggaatctgactgcacttctcattactgctattattgttttaaccgttgtctgtatcggctttctcgccggaagagacaaatcctcacgtacttctgtggaagaatggtctgtcggcggcagacgcttcggcggtcttctcgtctggtttttagtaggcgctgacctttatacggcctatactttcttagggttgaccagtactgcttttacaggcggaagtgttgcatttttcgccattccttattctgtgttggcctactttatcgcctacttcttcttgccaaaactttggaaagttgcgaaaattcataaattaacaacactcgcggattatgcccgggaacgttttaacagtaagcttttggcaagcctcgttgccatcgttggggtactcatgcttattccgtacatatgccttcagctgagcggcattcaagacacgcttcaggttgccggcactggctatattaacgtaaaattcgttgtgatcatttcatttattcttgttgctctttacacattcttcagcgggattaaagggcccacatatacagccatcattaaggacattttagtatgggtcattatgctgtttatggtggtgtccctccctctcattcattttaacggctggacgccaatgattgacacgttagtgaaggaagcgccgcaaatgctgacgataccgtcagaagggccaaaaggcattccttggtttatcacagcatctattgtttccgctctggcactttttatgtgggcacatgccgctacaggtgttttcacggcgaaaagcgctgatgcagtaagaaaaaacagcatgtttttgccgctttataatatcgtgttaattttggttatttttcttggctttatcgcctttcttgttctgccggaagatacaaatccaaggctggcgctgctgcatttgattcaaacatcttacggcggcgtggcacaaggctttgcatatgccactatcgctcttgcttcattaataccttgttccattatggcaatcggcgcatcgaatttattcgccaacaacctataccgggatttgattcatccgaatgtgtcgcaaagcaagctgactcttgtcacacgttcaatggtgtttgttgtcatcggtcttgcgctgctgtttggaatgctgttcccgactgccttagtgacacttcagctattaggtgtatccggtatggtgcaaatcttccctgcgattgctgtcagcctgttctggaaaaaccaaacgaaagaagcaacggttatcggattattagccggcctagcggtaacgtttattgtgtatatcactcaatccgcacatggcatttatgaaggattctggggattggccgccaacatgatcgctgtggtcatcctgaatccgctgttcgttaaaaacgcgggatccaatcctgtcattgaaggtttatttggcaaaaaacaagacgctaatccaaatcaaaagggcgcataaaaaaaccatacgcggcagccgcgtatggttttttttacatttcttttttcagtgtttcaattgccttttccatttgcgtatcattatcagacagcttcttttgaagttctatcattaatttcgttgttgtatcgccagtcagtatgcctgtttcattcagcttctcttttttctggaactgtttgacgacagatacaaaatcctggtcatacatactgttaacctttaccttgtaaccaagtgctttgagcattttctgagccactttgacgtttgtgcctgtatcacctgatttgtacgttttatctgcgtccaaatacggcagcttcgcgtaatcaggcagctctgctttcacttgaggcttgatgccttttttgtgaatccattcgccatcagcagtcagccatttggcaactgtcagtttgacggtagagccatcatcatattcttttgccgtttgtactgtacctttgccgaatgtcgtctcgccgattaacggtacgtttgacgattcatgaagggcagcggccataatttcggctgcgcttgctgtaccgtcatttactaaaacgacggtcggcttggtcactttccgttctttttcggccttcatgacttcttttgaaccgtttttgtattcaacctgcatgatgtttttccctttatcaatgaacaggttgctcatcgtaatcgcctgttccattaagccgcccgggttgcctctcaagtctaaaatatagcctttggcgccttttttctctaaactgtcaatcgcatctgtcagctctttagctgttgtttcagagaaagaagtgatttgaatttctccgatgttgttgtctttcatctctgaatagacagtctctacaggaatggtatcgcgcttaatggaaagatcgatattccccactcccgctctgttcagttcaagcttcacctttgtgccctttttgcctcggattaaagcgacggcttcatttacattcatgccttttacgctttttccatttaccttaatgatttggtccctcggtttgataccggctttttcagcaggtgaacctttaattggggatacaataaggatttctccgtctttctcctctacttgggctccgattccttcaaaagatgctgaaatcgtctcgtcgaatgatttcgcttgctcttgatccatatatgtagaatacggatcatccagtgattgaatcattcctttaattgctccgtctactaatttgtcatcatctgttttttggtaataatcacttttgatttgctcatacgctttatttaatttgtcgaacttgctgtctcctgtgcttgctgatttttggcccaggatactggaattgcccgtaataaataaagtaagcgccgaagcgacaactgcagtgatcagcacaataaaaaacagttttaattgccgtttcaattaaacaccacctttttcttcttacattattatcatggacgaattcttattcgtcaactcggagcagaaatgaaagagaaacgcccttcttttgcttttcataaacctatgtctttatacgacatatgataaggaaaaaggaggattcgatattgagccgatatttagaaatgctgtccttattcggtgtcgcaggggcgcacccaggcgggctggctttttcaaaagcggtcttgcaaaaggctgcaccctctccggatcagccgattcttgatgccggatgcggaacagggcaaacggcggcttatttaggacatttgctgtatcctgtaacagtcgttgataaagatcctattatgcttgagaaagcgaaaaaaagatttgcgaatgaagggcttgccatccctgcatatcaggcggagctggaacatctcccgttttcttctgagtccttttcctgcgtcctgtcagaatcggtcctcagtttttcacgcctgacatcctctcttcaagaaatttcaagagttttaaaacccagcgggatgctgattggtatcgaagctgctttaaaaaaaccaatgccccctgcagaaaagaagcaaatgatggatttttacggatttacttgcttacatgaagaaagcgaatggcataaactcctaagatcctatggctttcaaaaaacagaagcgatgtcacttcttccggaagacatggaatttgaaccaaccacagaaatggatttatcgcaaacgattgatcccatctattacgatacgcttcaaacacattatcagctcatgcagttatatagtgagtacatgggtcattgtatttttatcgcgtacaagtaaaacggcgtatcgccccctgttttcgtccaacctttttttcctatctatcatatgctgatagaaagtcaggataggaggggaacaatattggagagatattatcatctttgcaaaaaccatcaaggtaaagtcgtcagaattacagagagaggcgggagagttcacgtcggcagaattacccgtgtaacaagagacagagtttttatagctccggtcggcggagggccaagaggtttcggttacggatattggggcggttattggggatatggagcggcttacgggatttccctcggtttaattgcaggagtggctctggctggtttattcttctggtaagcatagaacaaatgctagattcaccagacacaatgaagcccgcttatctagtgtaagcgggcttttcattttaaattttcttcactttttcaaagtactcttcaagcgttaaatcattatcttggatgacctttgcggcttttttgcctacatagcgcagatgccatggctcatattcatatttcgtgatatcttctttatttttcggatagcgaataataaagccatatttataagcattgtcctgcacccatttcccgtctgccgtgcttccgaacgcttcatttagctcaaagccattgctccggctcgaaatgtccatcgcaaggcctgtttgatgctcgctttcacccgggtaagcgaccgcttcctttgccttcctttccccttttaggcttacttcattgtcaaaaatgactttctgtctgtcatacgaacggtaccctgagacagctgccagttcatagccttcctttttggcagcatcgaacattgtttttaatgcgtcggccgcttcttttctgatgtaacgtttttgaatcttttcttcaaaagaaaactctacatcaggtatgacaagatcgctaggttcatagtttccgggcagtgcatattgtttattgacaagcgcgagtatattttctggattttgaatggtttccagaccatcgacttttttaatatcattgaaatactggctttccaatgaaaactcactgttttgagtgtttgattttttgctgtcagctgttttttgttctgtttgctttgtttctgctgtggttttcgtatccttttgagcatctccgttcgacatgctgcagccggctccgactattgccgttacactcagagcggcagccagtgagaaccatttaccggactttttcatattacattaccttccttttatcaatcgtttccgcatgcataaagaagaggctgccggcacccagcacgcctcttgatatattttattgtgatacggaatgtaaagccacttctatcatatcatgaaatgtcgtttgacgctcttccgctgtcgtttcttctcctgttaatacgtgatcactcacggtgagaattgacagggcttttcttccgtgcttcgctgctaatgtatacaatgcagttgtttccatttcaacgccaagcacaccgtattttgcaagtttttcaatttgcgaatcgtcattgtagaactggtcagctgtaaatacgcttcctacagtcaccggcacacctttatcctttgcggcatcataggcattttttaaaagctcgaaatctgcgcaaggcgcaaaatcaacgcttccgaaagcaactctgttcatttgtgaatcagttgaggaggtcatcgccaaaatgacgtctcgcactttgacatctttacgaatagcgccgcaggaaccgactcttattagattttgcacatcgtagctttgaattaattcattcacataaattgaaatagacggaactcccattcccgtgccttgtactgagatttttttacctttatatgtacccgtaaatccatacatgcctctgacttcattgtagcattctacattttcaagatacgtttctgcaataaattttgctctgagaggatctcccggcaaaagcacagtatccgcaatttgtcctttttcagcacctatatgtacactcatctcatatcctcctgtaaatctaaattatcatccagcccgtccattttacaacgaatgtcatgatgaaacaaacttcagcattgattataaaggaatatatcgaaaaaagaaatgttcgaggatctgttaggcacttcctcagaaaaacggataatcggggtgttaatttgaaaacctaaccgcaggaaggaggggtgggacatgggtaaaaaacatcgtaaccggatcaccggccaaaaaaagaacaatcatatacctgaaaaagatatcattgcagctgaagaagcacacgggaaagaatattccgctgccaaacgcaagccttaaaactgcagaaaactgcgggtttccgcagttttcttttcattatgtcgtttgtacaatcagacgattgattttcctccagccggcgggaagcagttgataatatgttttcccttttctgccttcatcaatcaggatcacgtcccctgtggccatgaatcttgcatcataatcactcggaacagtgtcgaatacattaaacaaagagaatgctcttttcagcacgtcttgatgatcgctcccgttcagttcagttcgatagacggctctgtagccctttttttcgccaaaccggggtgtctgaaatattgtcacgtcataggaacaagacttctttttaaacacggataacatcatcaagatcccctcccttttatttctttaacatattggcgtttttgctgtgttttcctctctctatttttgtcgaaaccgcttaatcttttcgtcaaaaccttttactaggaaaaacagaagcaagccgaggctaaagcctcctaacacgtctgtcacaaaatgaacccccagatacactctgcttatgccgactaaaacagcaattacaccggctatgatatataccatttttttatgcttagacaaaaacgggagatgtttcactaaaaagtaagcaataacaggatagacacaagcagcattcatggaatggccgctcggaaaactgaaggatgattcatgaaccagcggtgcaaaatcaggcctcactctttcgatccattcttttaagactttgtttaacagccgatctgtgccgaatactaagagcatcaacaggccgtcccatgtttttctgtagaaaaacatgcctgctccaatgatgacaattagagggagcagaaaagaagaagcaccaagatgcgtgatccccgtcatgacttcattaagccatggctgacggatcaaaacagctgccttgcttattgcttcatctgcagattgaacagcatttgtatgaatggccgcagctagaattaaaaagaaaagaaacaaactaacgggcttgtacaattttaaccacctcaattttcacagaagtcatagaacatgaataataaaaccggagctgaccgctccggttttaagcctcactcatcttcatccagctcttcatctatcatacatttttctatcaaataatcaaaggtaatatcagcgatttcaaacagctcatcctcactcggtatgtagccccgtcttgcaagctctctgtaaaaaaattcagcgatttcttccgtatcaatcacaagatctatttctttcatctccgtaccgcctccttttttatgttttatgaaaaaacaggctgaattatacccggtgttctaaacaattctttcagtcatatattgaataaaaaacgagccatgggaggctgacgctatgattgctaaaatgatggaagcactggacggagaaagatttgatatcataatggaaaaaacgctcaaaggaatgacgcgtgtgatgatttggggctgtctgccatattttttatatgtcttgatccgtatgttcacaaattaactgaaatgctcttttaaactttccaaaacaaacatcatcatgtctttatattcttcatcctgaaacatttcgtacagaattttgtagtcattataaatatccagaagctcatcaacaattgacacagcaaggatgtgaagggtatcttgatcttcatcaccgccttcaaactgaagaagagcagacgatgcgatatcttcgccgatctcatggccagtttctccgacataatggacaaacaacagctgatgcacaaactggtccatttcatattttctaagcaccagcgtgagatcctcttcctccgtttcaagccactctccatcctttaaacgggtcagctcataaatgatatcttcccagccatcttctaaatatctccaaatttctgttctatggccgataatgcgaaagagttcttttccataatctttaacataaacaacgtccccaataaggaattcatactcaatatcaagcttctccatgtcgacaatgacaccctcataatctttataaagctgaatagatgattcaaagtataaaacttcgttatgattgacttcataaagatagtgtttatcaatttggtgtacttttgtgatggtgccgactgttccatacataatgacgactacgatatcccctacttggaatttcggtttattttgcttcatggtgtctccccctcgccgcaacatttctcatacgctatcgtatgccgggtgaagccaattcgcatgggcatgaaaaccaaaggaaatatccaattatggtatgggtatggacataaaaaaatccgcagtgatctgcggatgaaacagctattatctgccgtgcacttcagactcgtattgatcccaagcttcatcaaacgtcgccatcgtgtgaaggtaatcagcattcagctccaaatatgaactgatttcatgataatcggttgatgtttttggaaagctgtgatcctcatacgcctgattggcaaattcactgatgctgtccttcggcttagggtgtctgtatttcaataaatagtgataaaaggatttcatgggtttcccctcctgatgtctgtcttttgttgttctattatacagttcaagtgtaaaattacaacaaaagaatactgaaacatgactcaggagaagtcaaaatagttgcgtttcaaaattctttctgtctccatgagctgctgatatgtcaggctttcaggcagtttttttgtttgaattaaaagcagctgatcctcaatctctttaaccgtgttttcctcttgataggtcataccgcaggaagaacataccatggcaggggtgtctgtcagttctatagccctcgttccatcagggagctcccagtacaccgtgttcctgccgggcaccgcttcgagctcgccgcaccattcgcatgttttcatgaagaatcccctccgcattcagtctctttctgttttttctgctgcgccaaaaatttcttttctttgagctgatctcttttctcacgccgatcttttaatgtttcatgctccggatttgcgatgtatgcctctctccttttgattctgtctacattttcaggtgtaaacgaaacttctttgtcagcaaaaatggcactcagcccgatcggctcctttttgtcagcggtttcagggaaaacggactcaaaataggcgtctgcctgattggggatataattctctggttccggatatgacgtaatcacaccttcaaaatttcttaagatcactttgtcaggactttgtgacaggacatagtttggctgcagggcgattttacctcctccgcctggtgcgtcaacgacaaaggtaggaaccgcatagcctgaggtatgacctctcagcccttcaatgatctccaaacctttggaaacaggagctctgaaatgccctattccttctgacagatcacattggtaaatataataaggacggactctgatttttaccaagtcatgcatgagctttttcataattggaaccgaatcattaatacctgctaatacgacagcctgatttccgaccggcactcccgcgttcaccagcttttcacatgcctcaacggattcttctgtcatttcgatgcttgtgttaaaatgggtgttcagccagaccggatgatattttttcaatatctcgcacagatgatcggtaatgcgctgcggaaagacgacgggagctcttgttccgattctgatgacttccagatgcggaatgctgcgcagctcttttaaaatatattctaaaatttggtcgttgatgagcagcccatcaccgcctgaaattaaacaatcgcggatttcgggtgtttcccggatataagcaattgcagcatcaagctgttttttggggacgcccattccgatttgtccggaaaagcgccttcttgtgcagtagcggcagtacatggaacattgattcgtgacaagaaacagcacacggtcgggatagcggtgtgtcagaccgggtaccggtgaatcttcatcctcatgaagcgggtcttccagatcgtattttgttttgtgcatttcttcagaaagcggcacagactgcatgcgtaccgggcatctcggattgtcggggtccattaaagaagcatagtaaggtgtaatatttaaggggatcgttttggtagaaattctgacgccttcctcttcatcctcggtcagattaatgactttctttaaatcatctaacgttcttacagtgtgtgtcagctgccaaagccaatcgttccatttctcttccggaacgtccttccataactcgatctccttccaatgccgtttcggtttataccatttgtttttcaaacgaactcctcctcgcgcatattttgacttacagttgcttgcaccaaatattcatgttttcaaggccttcggctataaagcaattattgatcagccttccgccatactgataacctgaatggtacaacacagcattcatcccaaaagacgaagcacgggcgagagaaaacacatgaacgatatcctctccagccatttctttttctaacgcctcgattaaaaagcttgttaacgaatggccgcgatattccggcagcacagcgcaatcggttatttctgcatgcccaagctctggattgatttctgcgcttgctgcgctgatcaggcggtcatgatcaagcatgatataatacaccgtatttgcattcatcgtcttttcaatataagcggggtcaaataccggggttgggtacgtgcggaatacttttttatacagcatcgatagctggtacatgtcgtttgtttctgcttttctcatcgtaaaaacgggtgtactgtcgttgcgaagacggggcgctgtgcgatatatggcttcgatgatctcctgttcctctgtataagaatctgtttgtctccggctttctgaaaggtaacgtaccatgacacaagccgaatggccgagataatagccctttagatagccctccggcgcaaataattgtttggcaaggatcggctcatcatgctgcttcgcatagacaatgattttttctgcattctcttcttttgccgctgccacgatatccggcagggccttctcaatggctccgtcataacgaaccactctgattcgtttattaaagccgtcatggtccaaaactgctgtgacaccgctactctttattgacttgagcatccgcatcctccccatctgtatgaaggccgcaccaatccatgacaaaaagtgcaataattttagcagattctatcatggcttcaacctcaatgtattcattggcctgatgagccgtttttgtttcccccggcccgaaaacgatcactggtgtatctcctgcatggtacaaaagccctccatccgttccccacggggaagcctcaataatcggctctgtctgtttcattttttgataggctgattgcagcacagaaattaaagggtgatcatcaggtaaatcattcggcagccattgagcgccaaaccattcgacttgtacgggatggcgtttaaaccattcgtcatggtattctaaatccttcagccagttttccaattcaagttttacagcttctggtttctcatggggagcaattccgcatctcccttctatgacgacacggtctgcaactgaagatggccaggcaccgcctgagatggtgccgatattcaccggtaccggtattgggatattgtcatacagcggatctgaaattctcgcattgcggactttctccagctcttgtatcgctgtgataacgtgcatgcttttttcaatcgcgcttaccccttcatagcgtgtgcccccatgtgcggataatcccttcacagtgatccgaaaccacatcgaaccctgctgcttaataaatagtttcatattcgtcggttcaggaatcagcgccccgtcagcacgatagcctctcatgatggcggaaagtgtaccggcgccgccgcactcttcatctacaacactctgaaacaatacatctcccttcagtttgacatcgcaggcgtgcagggcttctaaagcaaaaagaagggctgtattgcctcccttcatatccgttgagccgcggccgtatattttaccgttttcttcgacagcttgatacggttcatacttccaatcctttacgcttccttcaggcacaacatcgatatggccgttcaaaatcagggacctgcctccgccggctcccgtttttttagccacgatattcgggctctcatgaaaatcggatcggttagatttaaagtagggatgctgttttaattgctttatgcttggctcccatacatcaatgtccatatgaaattgccgcagcttttcaagcacaacagcttgggcgttaaactctgaccccaatgtgcttttttccccaatcagccttttgagaagacgaatggctttggccgaatgctgatcaagccactcgattacttttctttcaatgtcttgcatcctcattccccctcttaagaaaaaggcatatctattttgatttcagcttctgtcagcctcgtcacctcatcgattgtcgagccattcatcagctcttttaaaatgaagtgatggctatcgacctcaagaaccgctttttcggtaataatcaaatctacacagcctgcagcagttaatggcagcgtacatctttctgttaatttaggccttcccttttgatctgtatgactcatgacgacaaccacttttttcgctttttgggcaagctccatcgccccgcccataccaggcaccttttttcccggaacaagccaatttgccaaatctcctgattggctcacctgcagggcgcctaaaatcgtaatgtcaattttgccttttctgatcatcgcaaaagacatggttgtatcaaaataagaagccccttttacagcgcggacaggatatcccgcggcgttgcataaatgcgcatcctcttctcccttttcgggactttctccaatgccaaggacaccgttttccgcttgaaacatgacctgcatgtcaggcttcaaaaagttcggtaccaaggaagggataccgataccgagattcacaatcatgccctgcttaatttcagtagcagcgcgttttgcaatctgttctctttctgctactcccaagcccatttccacttcactccctcgcttcgtacaaccccctcaacaaaaacccccggtgtgacaatcatttcttcagaaatctcccccatcggaacgatacgctcagcttcggcaaaggttctcctggcggccattgccataagcgggttcatattgcgcgcggttttgtcatacgttagattgccgaattcatctgcaatgtaagcattgatgaaagcaaaatcagcagtcagcgcctcttcaatcaagtatcgttttcccgccactgttacgatgtcctttttttcgcaaaccatttgattatcaatgcccacgtcggttaaaataccgccaagccccgctccgccggcgcgaatccgttccgcaagcgttccctgaggtgaaaattgaacctctaacgtcccctctgtcatctgttttccggctactggattggaaccgatatgcgaggcgatcagggttttgacccgttgattaacaataagcgggccgattccgatatccgggaaaccggcgtcattgcaaatcacagtcaaatccgttacaccgctgtccaatatcgcttcaatcaatgaaggaggcgacccgactcccccaaaaccgccaaacatcagaaccgatccatcccgaacatctgcaattgctgtgtcaatgctgattgctttttgaaatggcgccatttaatgtcaatccttttttaagtttttttcgaccgctgcaactgtttctgaaaaaatagagataagctcttccatttcaccgtctgaaatagtaaaaggaggagcaataatgacagcatctccttctccactgtctattccagctttggaaggataaacaatcagcccgcgttttttcgcctcgctgacaataagctgggttatcgcctgctctggcggaaacactttcttcgttttttggtctgccacaaattcaatgcctaatagcagtccttttccgcgcacctcacctataatgccgctttgagatgccgcctcatcaagcttcttcttcagcacagcgccctttttttctgattgtttgatcaagccgtgctttaacacatatcgcaaaacttcaagagcagctttggctgaatagggatgtgcactatatgtgtgaccgctcataatcacacctgacccttgttttatggtttcaataatagaatcagatacgacggcagcagcaataggtgcataccccgcaccgagtcccttccccagtacagcaatatcaggtacggtatcccaatgctctgtcgcgagcatccttcctgttctcccaagccccgtcatcacttcatctgcaataaaaagcacatcgtgtgtgcggcatacctcacttaatctctcataatatcccggaggcggagtaatcgctgctcctgcagcaccaataataggctcagccacaaagccggcgatgaattggcttccgattcttttaatcatggtgtccagttcatcagctgcagtctgaacaaagtcttcttccgtctcgtgattcagccgataaatatgtggagctgagatagctggataccgctcaatgagatgggtgaaccggtatctcctttcataaaaaccagacaatgaaagcgctcccaaagttattccgtggtaactgctccatcgagacaaaaagatggatttttgtgtttgctttttttcctgccaatactgaatggcgattttcatagctgtttctatcgcttctgatccgctgttgacaaaaaaagaccaattcacatctccgggcagctcctgtgccaagagagcggctaattgctcggcgggctcactcgtaaactgtgagcggtaagcaaaagacacctgatcaagctgttctttcagcttctcagtcacatcacgaactccgtggccgatattacatgtcaccgcacctgacgagccgtcgagatatttttttccggtctgatcataaacatatgaacccttcgcataactgacaaccggataggccgagctaagctctggcttaatcaaataactgctcatgctcccacctcaaaaccccttttaccatattgtatgagtgtccaaatggcggcatgacgttccccgcaaaaactttttcacataaaaagagccttcctaataaggaaggctcttttgaaatttcagcatctagcaaataaaagcggctccaacaataattaataaaatgaacaagacaacaattaacacaaatgtatttgtcccgcagccaaatccgtaaccgtacccagagtatccatacatgctgttttcatcctttcttatcacgatatacgacattttatgcgggccaagtcccaaatggtttgtgcaaacgcctatttcatgtaaggaaataatgaaatacagtatgcacccgctcatattttttaaacgtcagcttttcgtaaaactgagttgcaccgtcagtgcttgcagccactaagtaggctgcttccattcctagtgatttggcgatggacagcatttctttcactaagatactgccgtagcccttcctttgaaactgatctaaaattgccacttcttcgattttagccgttttctcttgatgatcgataaacagctcgccgcacccaatgggaactttctgtgcctggtcgctgtaacaaacaacaagaatgattatatctgcttcatagaaaggatattttctttttaatttttgttcagcgattgcttctccaatataaatggaatcgtaaattttcataatagaagatccgtcgctaagactttttgccgtcccccatgcggttaaaggatgtcccatctgccccttccagtcactaagcttcatgtcatatagtagctcatcctcgacgacaaaaccgctttttacaagtgactgcttcaaaccgagcggaaaaacatgctgcggcgacgcttttaaatggagataattcgcatcaagcagctttggtacggagggtaaaaagttaagtaaccgctccaatggaaacgtatcatggagctgaacaaagttatgagaaaaaatttgcggaagctgcggatctctgtatacgctgtaatgatcaaacgatgccgattcagacgttaacaatatatattgatgttccgtttttgaataatgtcctgtcatgaacgtctcctttttatgacctatacctttactctgttgcaatattcaatttctttataatctcatcgtacaccggataaaacggctttccaattggaaattgctgaatatttcggaaagaagcggagattggcttctgatgtaaaaaaaacttccttgttacttgttcactaatcgggtgaaagacgccgtttagaaacaaaaacggctcgcgttcgatgaaaaacagacgtcggccaggcggatttttgatcaattcagatcgtttccacgtaatcggcggcccttccggaagcgtctccatctcttcttttccaattgtcactatgtcttttctttgaaattgataaaattgaaacgcatactggtccacaattcgccttttttttccggcttcgatataaaatattgcaggatggtcagcttcctttactaaaatataattcggaatgtttaaaattttgccaatcctatattggaataaatatgggtctggaacagcgacagtccgatttagatacaaaaaaccccacttttctccaacaggatgccttacaccctgatcaaaaaaatacacattttgatctgaaccttttacaaaagagccgtcaatcaaatcggcgggcagaaaccgatatgcattttgaaatgaatctggggttttataggttgtgtctaatacttcatttatcggcagaaatggggtaaagttgttgagtctcgcccaaaaaattgcgtcgccatgattccaatgcttcatatcatcatcccagtagcctccaaatttatggtgaatgagattaagtaacgaacggcgatgcataactgagcaatgatcaacttgaaaagcggcctgatcaagcactgcattggcatttctgtagaaatgtgagatttcctctcccctttcgtttacatgtacaactttttgttttgaatagaccgcctgcgcttcaggcttatgtgaaaactcttgcaccatacggctcagccgctcaggatgataaacagtgtcgtcagtaagataggaaatgtaatcgccgtctgcaaatgggagcgcactgttaattaatgtggcataacgggctgtttttaatcgatctgcaggatgcacgaaactgttatgatattgaatgcgccggtcatggagatacttgtgaatcaccgcagttgtttctgcattcgaatgatcatccatgataaaaagctcccaaagatcatgcgtttgctgtatcacgctttcgatcgctttttgcaaataatcgggtttgttgtaacttgttaaaataatagacactttctctcccatctataccgcctcccgccgtcaaacataaaaacggctccgcagcaagcagagcctctgtcatcatttaaaaagcaccccagcttacaacacttgagagtgaaacatgagatctcgtgttatttaacgggttttggaaaataaccaaatcagtcagaacttcttttacgatgacattttgaagtgtatctccgttgatcaaattgacttttgaaaccggtacgcccagctcttttgcaaaaacaagctggcgtctgaggtcagatggatttccttcagaagacgattgacgtatcagcagaatcagcaaaagcaaaataaaatgcagatcatcttggttttcttctcgatccacttgtttctctaaatccaaatcatccctctcccttatccttatctctgtttcacaatatgtgcgacttcgatttatggtataggctatgtccactccattaaaaaatcagcattttccttaaatagatgaaaaatagatcaggtacggcgttcgactcataccaaataacagccggaagaatatgaataacgtgagttcactatcgaataggaggtgtgtgtaatgagctctgaaaatgcacagttaaaaaaggatttaattaaagccgttttaagccctttatttccaactgcaacagaaggaggagaaaatatggatagtaatcttaaagccttgcttgatgctgccatcgatcaaaaagtagatgaaagtgaaacggttacggcagaatctattttagacccttctcttccggcaagatggatttttgccagaattacgccaggcactacaatcagcattgtgactgattcaggtgacatgatcggaccggttgttttcgttgctttcgatcaggttcacgggatcgtatttgtaacacaggaaagctccgtcactccggcaggccaagctacaacattaattgatgtagacaaagtagaaagcgttacgttcttttcataacatccgatgaaagtcttgtatatccagtcgggatacggaggaatatacagttattttgatcgctgggctgaagaatgttttcagaacactcatacagagtatatgattgcagataaacctgaagcagaatctttgatgaagatcgaagcgtttcagccggatttcacacttatgatggttggagaccgcgttcctcacgactggctgacctggttaaagggtaaggatatccccgtgtatgtttggctgaccgaagacccattttatatggatatcagccttcaggtaattaagcttgctgacgccatattaacgatagaacaaaatgcagctctctactatcaagagctcggctaccagaacgtctattatgttccgataccagttaaccatcggctgtttaaaaaaatgggcaccgaacattcctatcattcaaatctgttaatcatcggctatccttaccctaatcgggttcagcttatgaaagaagcggtccatctgccattcacggttcgggtaatcggcaaggaatggggaaaatatctgcctaaaaaagtgctcaaacagccgcatattgatgtcgtcagcacatgggttccacccgaacaggccgttcattattataatggggcagacatcgtaattaatgcgcatcgtccctatcattttgctttcaaccaaaatactatgcgcatcaaaaatgccagttttaataaccgaacgtttgatatcgctgcatgcgaagcatttcaattaacagatttacccgcggcgcatcctttttcatccattatttcttatcacggcatgaacgactttaaggaaaaagccgctttctatatcaaccaccctgaagaacggcaaaaagctgcagcagccaattataaagagaccgtacccgcatttacgtttgatgagcttcctgcaaaactaaaagcgattcatctggcgctttcttgaaaaatcgttcattgctatgaacgatttttttattcatagaaaaaagcagctgcacaagctgctttctattctagccgtcagaacggtctttcagcttcctcggatttacctgtttatgaagatcaggcatttcgccgagatgctgtgcaatttgttcccacgatacaattttgaaattttgattgacggcttgtccgttatcaatattttcgccgtcctgcgccacaaaaatcccgtacggatattttgggccaagtccgaaaccgagaacatcaataccatccgtgtcactagtaccgtctatcttctcgccatctgtaatctcaaagttggctacatagcgatttttcccctgccgttcatacattgcatagctgttatttccttgacttgaagccatgagatatcctttgccatttggtgcataatagattgtcagtccttcaatatcagctgtcaaatgatctcctgtcgcacggtcaacaacctgcccctttgaccctccgccgggctcagcgttaaatttccagatggcctcatcttcctctgctatgtataggtttccgtactcatcatccgcaacaaggccttcggtctgagaattcaacttaaattcacgcacctttttccctgttacataaccctttccaccatcaacaatttcatactgctcaaattccccttgtttgcctgtcactaatgcgtaaaatgctcctgttttctggctgtgatacaagctgaatccataaacctcagaaatattggtggaaataggatggttcggatctgtaatgcttttcaattttcctttatccccgtctattgcatatacttcaattgtattttttccttcggaccggttggatgcggcagcaatatcaattttttcgccgttcaatggaaaatcatagcgcagatcgacattattgagcttgccaaactcataagaatgaagctgttttccgtctaaatcatacacaacgagccctgacttcttatttgttgtaatcaacttgcttttttccgggtgtttttcatgaacccaaatggccgggtcatctgctgcatcatcgccagatgcgaccggatctgtctccgtgtgtgcagtcactttgaaatgatgttcctcattcacataatgagccgacaccgaggttgctgtcaggctaagcaataaacccgcggcagtgcttagcagcattgtttttggaaccttcatttggtaccctcctcttttatcactaacactactattgtaaaatatatacaggtgattaccgtgaggaaaatgaacctttttttatagggtttctgactcataaacaacttattccccaaagaggtggtgagatgactttgccagatttacttttgcggagcgaaataaaaatatgttgaatatttagtacattatttatttagttttgtttttccctagttacgtccgtttttccattttctattaaaaaagaacactttgtgacatgatcattcccctaaattttgttttattggttgctttcattaattcgattacaaagttgaacatatgatgcatggtagagaaacgagagttggaggataagccatgcctaaacagcaaacagcagaactaaaaccatttttccataacaaaacagttttagtcactggcggaacgggttcaatcgggagtcaaattgtcaaacgccttttgatgcttacacctaaacaggtgattgtattcagcaaagacgacagtaaacagtatgtcatgagccaaaagtatgcggaggataagcggctattatttgtacttggagatgtacgcgatcacagaagggtgaatcaggtgatgaaaggcgtcgatatcgtctttcacgcggctgcgctgaaacaggttccgacatgtgaggaccatccatttgaagcgatccagaccaatctcatcggcggacaaaatgtggtggaagctgccctttcacaccgagtgcagcatgtcattaatatcagtacagataaagctgtatattaagatacttactacatatctaacgaaaaaaagaagcttactctgccttcctttccagagcagcttctaataaatgttgagcaaattgtttataaaactcatctaagtcattacttgcttcatcctgagttatatatcgaatactgtaattttctttctggactacctttattgtttttttctttaattcctcataacgttggtaaggttccaaggctacacccccgttttcacaggagtattatatgtatgtaatggtttgtctcttgactgttctttcttaattagttccccgcaaagcttgtttaaataatatgtataattcactttctttttcatcgagcgcacttcagtaccgatttcttcacaaatcgcaatcgggatactggctttgtttactttattcttatatgtatgtttcaactgtttttcagctatgttcttatatgtaaggaaatcattaatatgtacgaaataaactttgttttccggctctctaaattgaaacagaaaaccagggattatgtttgggtattgtgttgcttcccttaaatatttaatctgctgcggctttatgattttctcgctgaaggaaatggacttgctttttgtcgacttaagctcaaaggggaacaagtaccccttaaagaacagaaagcaatcatatttgttttttgatactgctgcccctcttttcaagaacattgggttaacatctttaatccggtaaaagaataacttttgatctgctgcagatttttcaatgttcgcttcaaaaactttcccttgattgtttgctcccaatcaatcactctcctaatctatattgaaggtaaattatgtatgtgctaaaatcgttgctgaaagaggtgtgcatagtgaaaaaacaatggaaaccagttgattcaagactcaatgagctcatgcatgaatatagcgtttcaattgaagatcttgttgaatgtactggattatcaaaacaacgtattaatgattatgtaggtggttttaaatcaaatatgaatattggaacagcaatgacatttgctgatgccataggttgctctatagaagagctttatgtatggaactttaaagagcgcagacaattaaccaaataacttataatatggttccctttttgacccaccttatttcctgcattaattcctcattattgtcagccaagttaattaagttacgatgtgctctttgcaaatctttttcttcaatggcctccttcactgtcttcatttgtctatccatcttgtttaacagtgtttgaattgaatgataagcctcgttaatttttctcgcctctttcccatatgtgcaatatttagttcattactttttgcatattaaactgttgtttgcaataccctactcttttaaaaagagaaactagagacttttttattctttttaagctgcattattaagcatttatattcgttgtaatcctcttcactatcaaatgcgaacattggatattgtgaatactctttttgaaaatactcaattcgcccccctacctggtgtagtattgaatactttgacatatcctcttcatatggaattgtaataacatttcgattacacataatacctccactaattttatttttattctaaataaaagaccgattttatcctgttcctatttacattaatctagataaacaacttcttttacaattggaaatggactactgattctctcacttaaatgcaaaactatttcagttacgtcttttgatgttgccacgtggactgcctttgtaattttaaaattgaattcattttcaattaagagacgtttaccttcggaaaatatatctattgaactaaccgcaaaatcacactttccatttattcgatacggattaaagcatttcacaaaataacatttatttaattccttactgtctgataaaacaatgtcaaattccacatcccaaacaaacgtgttaatcttagaatgataaactaaatcatgggtagctcctgtatctttaaaaatttcaatcattgaaataatcctccccaaatcactcctgctgcaatagcagctataaagacagaaacaaatttcattaaaatgaaaaacttaatatgctttgtttcgttctcagttaagtcaaaatctgataaagcgaataaaccaaacacaattaacaatatccaggctgtaacaatcaggtatctttcctccaatcatgttttattgtggcagatattaatatattccttcaggctattaactgttgaaataatacaccctcgaacctcttcaggatcttcaaaatccatttcattttgcagaacaaattcatcaaactcaatcatggcaagaaagcgatcgtcattgggtagcttattaaaatcaatattctttaatcttggaatacctttttcctttatccattcaaggaagggataatcaacatcattctttgctactgcgatttttaaaaactcatgaatatcagaagagttttcaatattgaaataaatcatgagactttccttcataagatcaaataatcacaataaagttttatcaatgttattgtctgatttaatttcaaagtctatattaaaccaggacattacgttctccattcaatccctccttgtacatctaaactattactcacttgactaaccccttaagcgttcgacttctgcaactaaccattctgcataactgatatgaatttttatcaccttggttgatctaagtcgccgagacattacttcaacaaattttttaacttcttcaaattcaatctctttcattgagtttatcccactaaatgaaatcaacgtcttaatcaatcaagtatcttattttttggctttatatcgatttcatcacaagaaggacatgaaaaatctgaattgtcacctatccaactaaaattgcattcattacaagtccaatcaatttgttctctactgtccattatagctacacctctttcttaataaattcaacattttatctacttccaattgtagttctccttttctttctctgaatcacctatatgcgaaagaatccaattatgataaccctcttctccacaattagggcaatccatttcagatataacctttaatgtgtttatcataggatttttagcaaacaagtgatgattgcattttctacaaaaaaacacaacttcattttccatgtctccccttcccttctgtataaaattagaattttaattaaatctaaatctcgaatgttttaagctcaaacgttttatatgaatctacttcttcaccaggtatcacattgacactcggataattatcatagtcatacgggtatccgatacaattcatgtgaaagctcgttccatctttgtcaaactcagcttgtaaatgatcatgtccacaaacccagtgttttgcgttaatgaacgggacatcaaccatgtagcatgtattaggctcaaatggagaataaggattgtgaacaggtggaacatgtgagacaaatacatcaacttgtgtattttcaagcgtttcataccaatccattgattctttccacatcgctcttacaccatctactttgttataaccattaagccaaatgtaattagaatcgttagatactcctttaaagaagtcccatccttcgattccttttggaaggtaccacattacatctcctgcaaagacttttcctttgtatgtttcagttgtcttaattaatggtgttacatttttcatgtcagcagctttttgaattagatcattcaacctgcctaacgagtctgagtatttccttttttggctcttgctaagtaaataaagatcatgattaccatatgtaaagtaaaccttctcgtattgctttgctgcctcatctaaaacccataaagtttgttgattccattcagtaaaatcgccggcaatgaccaatacctccccattaccgtttgagattaacctatttacaatttctcttgttcgcttctcccacttaatctgatttacattccaaggaatccaatgatttatatggagatctgaaacataatcaattttcattttgtctccacctttcttaatgaaaaatttatttctttggcgtgtataaattaaaataatctctccataatatgattcaaacaagcttgttttcattacactttaggagatgaataagatggctcaacaaagtagatcaagatcaaacaacaataatgatttactaattcctcaagcagcttcagctattgaacaaatgaaacttgaaatagcttctgagtttggtgttcaattaggcgctgagactacatctcgtgcaaacggttcagttggtggagaaatcactaaacgtttagttcgcttagctcaacaaaacatgggcggtcaatttcattaatttatgagggggataattcccctctcttttttaagtcttctctaaatccatacagaactaatggtattgtttccacctctttttatgtcactaactactattattaagctcctcgacttgcactgtgtaatgtctgtaccattttattgcctcctttgattagccactctataaattgcgttctcttcatttagaatatatccagcgctccgtcacaataagaacatttgccactaccctcttcacatgtacacatatatttgtcacctccaatttcgctaccgtcaactgacaactcctcagatatcatttaattgttgtttcagctcaaagaattcatcatgaagaaatttaaatttatccttatttacgtatgctttgtcatcattaagatcaaagagatctaagtactttcttttatttcttttaataattcgtaaagcaatagtggcacttacccactcttcaccttccaattgggttaagacttcacttagctcgaataacaattcaagcttagctttgttttgctgtgtttcgagttttaacagatccctttgtttttcaagtaaagttgtttcaatttggtatttctttttctctaaggctgttatctgttcgttggtgttatgtattttgtctcctacttccaatgaatcacctccttaaagtttgaataaaatattagttttaaaaaatgtatattttttgtttttgtatattagataaaaaaactgtcatttcatcatcttctattattatattatacatattatttgtatttgtctatagttattttattttcattcttaaatccatttacttagccctgacaaatgctaaaagggcttgagccgtataatgagtgcagctaaacacaatttcacattatatgaaaaataatactcaaagcaaagataaggttcccaaagacataagccaaataaatatacctactatggctcactgtttcgccctccaacacgtctaaaaccttaaacatgcttaggactgtgtatataactgaaaatgctgtccaacagagtataaggatattttcatgcataattaaaccgttatatgccaaggggatgattaaagaactccccttaagcaaagtaaacaggtaaattaaattcttatttcgtttcgcatcttctggagttgaattatcaagcacactctttacttttatatacgtattgctttcccctcgcataatcaacctgacctcattaatgtttaatacaattagataagctgatagaaataaagttacatatgttatagtaaacatctcctaattttatatttgtgttgggttggcttttactcaccctcaaactctataccgttaatatttgcttttattcaaatagctccccctttaaaatcattcacttgatcagcaatgttttctttaattgtatgtggcaactgatcaatcccttttataatccgtttctgaccagttttcctaatttttgtagtcatctctttaaaacactctaaagcagtatctgagatttcatcatatagcccctgaattttcactaatacacttaaatattcttcgtcaccttcttcaaatagcgacaacccttcttcaagtttgttgatcttttcaacactctttattattttatttttatccttaaacaattaatcccccacccagttttggtcatgcatcttcatgaagttagctgctgccttcttgtatctcaggtctttctcgtactcagcaacttgtctcatatgttcaataaattcatcttcaagtccttgtaactgaagaaacccaaagcaaagaccgttcctataaagcatgtcgtcatatttcgcttgtaaatctctttctttgctgttaataatctcttcctccttaaatattagataaaagtattcttttattcggaaatatttccaacaaaaatcttttatggtaaattaaaaacaatgtatttaaaggagtgttaatttgcgaaaaatattaaaaatcgttagcttactgattctattgttattattggtttattctttcttcagtcctaattcacaattatttgtgttcgttcagctaatcataattgcatttttgattggttttggaattaactgttttgttaaaaaagaacgataccaaggtactctatacttcgtaattgcaatatgcaacattaccattaatcttgataaaataaacgagttaattcagagcatttaacttatacatatataggaggtgggaaattacccaccttctttattggataggaactaatacttcacataagtgattatcaatcatttgtgaagtatatctctctataattggttctcctctcatagttagactatttttttctatttcagagaaaatattgccccaaaattcacttactgcctcttttgtatggtcaagcaagaaaacagcgtatttccctccaggtaacttaccaacttgagctggttgcagcacattaaaatcttcatttaatacaacaccaacatcataacggcattcctctttaggagtaatacttggatcatcttgtggaattcctaaaattacagagttatgaaatacaccattcaactgtgcccactttttaaaagattccattagttctttgttttgcttaccaccatactctccaacgtttcggaaataagcaatccttaattcaggtaattcttcaatagttattttcatattttaatcccctttcctagaaaaaggtaatatgattaaaaatgtttttcaagatgacttttaaaataatctatatttcaaatacaaaatccaattacttcgttccagttgatccgtgcccacctcggtcaccgttgcctagacggtctacctcgatcaagtcaactgccggcatcttcttcataattctgaactggcagattcgatcccctttcttaatctttgtgtcacgtaacgcataagcaggaaagaaccaaaaatcgttgtcacccttataagactcatcgataacacccattgagtttgtttgaatcacaccaaagttcttatacgtactcgaacgaggaacgacatgtgcttcgtaaccttcaggcaattccatggccactcccaatggaacaagtttaaattcatcttttttgatcgctacatcttcagctgcacgaagatcaatccaatcaccttgctccattttgttaattcttgtttgtgtttcatctaagtatttgattttaatttgcattatgtattagctccttttaattcaagtttgtttaaaattacccttttatcgtaattcctttagtaactcatcaagttcattaggcttaaaaccaacacttcggtttacttcttctccctgatcactcagcagaatggttaccggtactcccatgacaccaaatcttgctgctacttctggttcctgtgtaacgtcaacagtctcaaattgaatatttacttgttctaagtaattggacaccattttacatggattgcaattaggctgctctaatttaattaatctcattgaatacatcctttctcggtaaaaatgaaatctgaatcctttaaaggctccactgttgcttttttgtatccattccctttagttgaaaagaagtcatgggatttagtcttagtgttcaaaccattgataacaattggattaacatcctcttcttcaaaccaatgatcaaagcccagattgtttaaagctttatttgcgttgtatctgatgaatttctttacatctggagctaatccaacctgatcatagacatcttctgtatactccaattcattttcgtaaagttcctgcagtaagtttaaagcccatgcgtacagttctttttgcttctgtggcgtttgcttcttataaatctcttgagctaacaatcctacatatacgccatgtatcgcttcgtctctaatacccttagttcaaccgagttcgctactttcggttcgttgctctgtcgcaaccgccttacgttaccgtaaggagcagactatatcatcatccctgtaggatgcctcccgtttcgatttaaggggttctcacccacgccaatagcttgcgccctactcgttttgcggaatttcgccgcctatgcgatagtcgttgaacgttctatgcgatcccataaagtcttccatcttcttttatgtcgaattagactaacgtaacgaggatgaaggctgtatttttcaccagcttcaacattgttcattccagcaatcaaatcatagattaaatttgttgcctccatattagtgagctttgacattgaattactttctccaggttgtcctgacattaatccaattttcattgcatgtagagtattttctttaggtgtaactatttctaagttccgaacgtggttgtttagtttatttccatctatgtggtttacaaacattccttttggtatatcataaataaaatattttgcgactaacctatgtactaaatagttctgtgttccttttttcggatgcgtgtatcctatcatttcatagccatgtggagtaataaatgtctttcttggtttctttaatttttttgatatgataactcccgtttccgttatccaccaaggtgcttcttcgacttctttccttatcattttcacctcctttgggttcgcatagcttcgctgctgattgtcctaataaggattttccagcaattagagaggttcacatttgccgttgccgacaaaagggactattaaataatcaggttaatgatctctccactttgcattaactttccttgtccataaaaataaagtgggtaataaaaccctgagtagaaaagaaaactctccaggaacacagatgcaaccattcctttaaataaagaaatttcatcgtttttcttgattgttttatagactgaaacaattgttctagctttcttttgaagaaacctattgtttttcacccattcaaagacttcattgatctgctcggttggagccaatgttagaaagatgttgctgtaagactttgcatgaacagcattttccatcatggccatgaaatttaaaactgcctttctttgatgtccatctacgtgttcagccacgatcggcatccccgtattcccctgctctgtatcaagaagcgtaagtccggccagtaccttcatataagtgtcctgctcattttttccgaggtacttccatgtgaggagatcgccgtttaaagcaatctcttccggaagccagaactgtttcacgttttggttatagaacatttgggtaaaatcgtcttcatgctttgaccagtttgctgcgtcataaatttttgtcaattaatcatgtcctttcaattgaaatatttttttccgaaaaaaatgcagtgaatttaaaagctgaattgacagactcctatattactgtcaaacattcgaaaggaatgaaagacagtgaattttttagataaccttatatctttgttagagagtacagtcatttcaactggatggttgtgtgataggcttttatcatgtttaatcgaatatattttgaagcttatatttggtttactttgtaatgctcttatgagaaaatttaacaaaattaagtgcaaacgacgtccgggagatcctgttaattttgaaccaaaacgtaaacgtacctattaaactacacaggacaagcatccctcttgggtcgtatctttagttctggcataatataaagttttaattccacgatgatgtgcgtagaggtctattctatttaggtctctcgtcgtcatcgtatcctttaagaacaacgtaaatgaaatcccttggtcgacgtgctgctgaattgttgcaataagatcaactaccttaaacatatccatgtcgtatgcttccttatagaagaaccaattctgagccgataaacctggcatcggataatatgtcttactgtttccgtatgtacgttcctcaattctctccataattggcattacacctgctgtagatgattgaacatatgagatgcttcccgtaggcgcaatagcttgtctataggaatgataaagaccatatttcattacatcttctttaagcttcatccaatcttgaatattaggaatatgttgatctccaaatagctttttaaccttttcatactgagggctataatcatttgttacgtacttttcgaaatactcgcctgatttataagtcgaaccatcaaacttgtagtatgtctcccctgtttctcgtgcaatttccatagaacgctgcagtgagtagaagttaaccatcataaagtatgtatttgcaaaatccttagcttcttcactttcataagcaatattattttgagctagaaatccatggaggttcatctgccctagaccaattgatctcattaatgtatttgctctcgcaactgctggagcatttacaatgtttgttttccttgtgacagttgtcagtgagtcaattgctattctgactgttgaagcaattgattgattactcattacatttacaatgttcattgagccaagattacatgagatatctaagccaatttcatcctctttatcgtaatccgtataaactgatacttgtgacgattgaagtacctctgaacagttaccagtaacaattccattgaaaatcagagagtgatagtcttcttgtgttgtatcataaacatcctcaacaccatcttcttcaatactaataatttcagctgtaaaatcatgctttggctttcttgacttaggttgcaatgtctcagttaacaaattgaatttataaacatcgtattctttcatttcaacaatactcataaacaactctcttgagtttctatcttgaatactgattttgtgtgttggttttacattgtaaagcttagaaccaccttttccatcaggaaggagttcttgtgagcgcttgttgttagaataaatcgttgtataaacacccatgttcagtaacagcttctgaacgtcctgaaggctctcatagtggatggatgttaactcaatagttaatgctttggctttatgatttgcatttacacacccatcagtctggaataaacccgataaataagctgcttgcgtttccttattagcttgaaaaatgaattctgggactcttgtttttgtttctttgttcataccgaacttcttcaagatgtcaaataagacagtactattcatgtagagcaaatcttgtttttctgggttggccatattaaatgttgggagaagtgatgtattgtgcttataagcacgatcaaccttgtgtttttgaataatacggtgaactgcatcagtaactttctgctcaagaacttttttattatcgtataaataaatcttggcagttttttcagtaatggttccatcaccagctataatgcccataatgtatgcaagatcgggttcatgaattttcccgtatgctccttcagctgattggactaataatttatcgcctgttttcagttgattcaattggagcttttgaatttcaccatctcttttcacatagaatttgtgccactcagttgccctaatttcatatccttgcttcgttttgactttaaatatttccgcatcttttttagtcagttgcattggaattgcatctacaattgtggtacctttgctaccaactgcaaaatcttttgttctattatcaatgaccactttaagatcattctgctttttataaagatcggctgctttttcatatccattctcagttaaaagaagtgtttctccagtaacgcacaaatttgaaaacttcacttttgaaatatgttcatttggatgcactttatttacattgtcagcgaacataatatacggatagccagattcgcttcttagaatagccaattgctccaacaactttcgagcatttccctttgcttttctaactcttggattttcaacaagctcatcatacatttcattaatgtctagctcatctagatactgcccatactccttgtatactgaatgcggatagaacatgtaataatccttgtcttcccttgccaattcaataaatttgtctggaacaactacgccaatagacagtgttttaactcggacatcttcatcagcacttatttttttggtatccaggaagtctgtaatgtctggatggaatacacttagataaactgctcctgatccttgtctttgcagaccattcaaacgtgttcgctaagcacgtcccgccatatggctgcttcatgttaccatgaaggttagactatatcttcaccctctaagggtgcctcctgtttcgactgccaatagcttgcagcctacgcctttcggctagtcgttgcacgttcaagacttagtcttgcttcgctcatgattgtccctgtaggagttcccatgaattaaagaggttttcgatcaccattgctgatgaaaggggccaaatcaacccatttggtcggcatatctgaaggcattatctagaagtttcataacacctacgacacctttagtcgcattctctacgtctttaatcgcttcacctttggctcttagtttgtttagatttaatgctactcctccacctagcttagaaagctgcatggaaatatcaatagcacgtgaaatatcattcaaactgtcgcctacttcaagtaagaagcagctcaccatttcacctcttcgcttacgtccagcattaaggaaagtaggtgttgctggctgatactcttgtttcatcatagtatgtacttcctcaacagccttctcgtaatcgccatcagcgcaatataaagccacaattgagacacgatcctcatacctttccaggatctttgttttatcgtttgtcttcaatgcgtagtcattgtagaacttaaaggcactcataaaagaagggaatctgaatttgtaactgtaagcaatcttatagattgatttaatctgttcgaatgtatatttgcttaagaattcttcctcgtaataatcatttttaatcagatagtccagcttctctttcagatcatggaaaaagactgtgttttgatttatgtaatcaacaaagtaactatgtacggcctccttatccttttcaaattgatacttcccatctttctggatcatgatttcattattgagcttgatccaatttggtattgtgtttgtcaataagttgtacctcctgaatgattttctgtagatcttgtttcgttccactaagttcaaactttaataacaatggtgtgtggaacttagctgaaagcttgtctccagctaaaccatagttatcaccccaaaccttgttaccactaacagcaactcctctaattttatttttattcttattgataaaactcaaagtcctttcaggtacttccccaaagcctatcgtatatgtaatatgtatgaattcttgattgatgatcgtatcatcagttatttcaattgcctcaacgtcaaactcttgttgcagcgctttgacaaacctttttacatttcctgttttactctcatatgtaatgatcactaatcgttataagcccctgtaattaattttgtagtcactgtttcagcttcattttcagcgtaattgaatgcttctgatatctcacgattaatgtcgcccatttccatgtagccctgtgccatactttcatataaggaacttttcttaactggaacgtaatcatctagattcttttctaattcaacaaattgatttccttgttggtcagttgcaataatctctccttttaatacagggaaagattgcccatcagctaaatgaatatgagtgttctcagtggctactgtaaagttaataatgttcttcttttttacatatggttgagttggatcaatacgtctagctgcccccattttacatctccttattttttgtattttgaataaagctgtgattttatctagattcaagcagtacctattcgtcctccttaggaattgtcactcttcttcgatcgtccatccgtttaatcttgcgtactttaattttcttgaatatctacgcttccactcgtcccagtccttcttctcttgacctgacgttagtgagcctctgtactgattttgtcttcttttcttgtctagctctagtatatcgccaacccatctaggaactgacggcctataattactttgcgacatctattcgtcctccaattgtttctgtataaatttcattgtgtcttctattgtttcggccacccttctccaaggagttttttagcctcttcaacatctgtgaatctttcaatcttgtgtctataatcatcgatccaccggtaaacacatactgcattttcttcaactttcatgacggtgtactgctgcataggatcttctagaagatgaagtttctgatctttataaaacccttgaatcatataatatcctcctcttatttttattgaatttctcttacttcatgcggtactccgctttcttcttgagcatatactgcatcattatgagcctcaattgcatcatcataagtattaacaagtgatcccatacaataaagtccatatttcattttcatcttcatcatcctcttaatttatttttattctttaaagtaaactgccatcaataagcaataccatctcttcgtcattagaaatctcctcaagaacctgtttaaacggcatgagctctttatcttctcctggcgcccttccatgttgtatcgccgcataaacttgcccaacttctgtcatttcatcacttaactctccatcatcatcatctgtaacagtatctgtatacagttccattgccttttcttttgtataagccttaatcaatgcataataggggtcaaacacttcaaaatacttcataatgggtttttcaacttccaattcctcaacgtaatcgcctttaattttcacatcatcaactccgttttcgagcaaatgatctaccatatccttgcctagttgttctaacgctgctccttgaacagatggactttcgtcattaaatccttcatgagcgtaacaagttgcttttatttcaaaaactgctgctttaattcccatagcacaatgctccttttaatatttattttttagatttagaatccactaatctctttaaaatcatccttttatggagaacgaatgaataccaggtacacccacaacgctctggaatggattgagcacattaaattctatttctaccgccaaatctctgtctgagttcatttgaattctttcgattttcacattaacttcgcttgtttcatcttctagactagtcattttcattttataagtgcccttagatacaccgcctagttcaacccatttataaaccaataaatcattactaatccttactgtgattttatcttcgttttcagttgcctctacatttttgtaatgaagaaccattcttgtttcatttggtaaatgtttattcagtgtttcttcatatacggcaatttcttttaagatcatatctaactctccttttgaaaatttcggcttaaaataaaacttttatttagacttattgtcgttttgcaaaatggtgtcagcagctaaagatgtagctttcatttcgccgacaattttaccagttgatttctttttgaaaataatctttgcagcattatcatcactcatcttgagtgcctccttagataaacaatgtgctaacatatagaacaatcaatgcgaaagttgaatgaaataaagacttaccggctttcttgaaaatgttctcatctttttcctgatctgaccgttttacacctttgacaaatacattgagtaaaacaccaataacaaatgcatgaggtaaagtgacatggacattttgaatattgtatgtatcaataagcaaaggatttaacacatgattcaatccgtaataaacaattagtgacatagtcaacgcttcaacaaaaataagtaatccaactacaattaacgaacctgaccccataaagaatccgctccaaatatcttttgtatccttattcaataaatatctctcctttagtcttttttagttagcctctgccaccaggaagtttttatctgtctttgattttgagtatcattgttttttgctttcttattattgtgttcttcgcattccttcaagcttttttcatctataattgtcttaataactctgtctgtttgatatgtccactcgttatgtatgtttcgctgcctgtcagtcactatgacatattcattaagtccagggatataaactttacctccaatttctataggctcaatatctatatagccctcgaagattggttcagtacgagttaccttacacactggctgagtaatccacctctctgtgcctggggcacggtgtgagtaatacctttctttcataaccaatccttcaatcgttgctttatggcgtcccacttattcacctccttataagtctctttaaaaattgaattttaatctaaatgctccattacaatttttagataatctttatagtcagtagcaaccacactgtctccattaacaagctgttcagttttaactccaaagaaccacctgtcacctatccattgacgaccagtcatgttgtttaaccccagctcatcatgagacctaaatggatacacttcttcaatttgctcaatcatagcttttatttctttaaagtatttagatcgttttttgaaagcatagaatccgtctacttgatttttaacaatgtcatttttaaatatttcatacgcttctgttccttcgtagactccaaagtactcagagtgataaaacgagaagccttccttgactccatacttttcttcgaatttatcaaagaaagagtttatatcctctttgcgtttcttctcagatttataccagtcactttcctgtttaacttcgtaaatcggtgcatctaaggtttgcatactctcatctcccctaatatttctttctgcttgttttaatttgtcgtatactgcgcttgcccgggaaatcattagtatttcctttgatcatatttccccatctatatctttcctttttatagatccaccaacatcagaccgtctagtccatataccttgtctctttcagttaactttccgttttttctcattgtcttcaatgcattttctgcttgtttaagatttgagtaaatatgtgggtggtaaccatagagatatttcccttcactctttgcagcaattacaaacatgttcattcatcaactctccttattcaactcttaaatttagacaaagtcttcattttttcttttttagactgaaatctatgtcgaatttttaacctttgccataccatatactatccttactaaaggaggtggcaatatgggattctacagcggatattctggtggatactctggcggcggatacggaagcagcttcgtcttgatcgttgtgttattcatcctattgatcattgttggtgctacattcctatactaatctcagagtaaatccagagcctttgaatcacctccctgttcgatagacgccataaaacttcttatggcgttttttatttttacatttgtataaaaggaatattttatcctcttattttgtatttgatatttaatcctaaatgttctaatgtcttcttaacacttaaattgctgcattcatttttcactttatcggaataaccctttgcacaactttcacaacagttgaagtctacataagttttttcatcgctgatcctaagacaaattgtttttccgcttatgtactccttacagatgtcacatatatgattcattaacactctccttcgcctcaacgtaaatttattatatacatattatttgtttttgtctatcggtttttaaataatttctttaatatttttcagctttgcaaaaacagacattatatctttatcacaccgctcccaaacacgcttttcttcaggccttaaagtgttttctaaataaacataaagcttatccaatactccttcagcagcatctatatcatcaattacaagatccctaacaatatccttaatgataccctctccctatgaaaatatggttattgcttttccattgtcattttttatgtatggggaatattttcggtctaggcaattcttcgactttccttctcccaggcttacattataaatatcccctacctcataaacttcgtatgcttgttcttttgcatgttcaggtgatagcgcctcaataactagagacgcattttcacctttgctgtctttacaccttacataatactttttcaataaacatccctttatcctttcattttttctcgaaacaatttaatgaatcaagccttgatatgtatttggtttaatattgtgtagattgtttaggttagttaaccgctcgatttccttactcatcgcataacattgatcaacataaaatttctttggcataatcacaaactggccatctttaaatccttccgcaccggcttcttgcattgctgctggaaagatatcaattagactacctttcttaaagctctcaatatactcatctactgaaatagtgtgcaaaaccttagctaatactccattagtcttttcatcgttatgtacgtaaatgctttgtgtatgtggttcaataactacaaaatcaagagcgtttaccaagtcaattttttcttgatcagttagcatattcactctccttttaaatacgacttgaaaaactcacttaagttatcagccatagctgcagcaacttcagaaaagtatttatgtcttttctcctctgatttcaaaaactcaactgtcgtttctgcaatttctttaatcttgtcttctttgatatttccattcctaacacgctctttaatctcctctgtctctttttttagggactctgggtaactatccaatcgatccactcctcttattttatatttgtttaaaagacaaattttattcagattctttattaacatatgtatgtattaattcttgaaatatagactcaagcacactaactgtaattgaattaccggcttgcttgtataattgtgagttacttattcctgctgcaaaagctttttcaaaatcttcgtcatcaaatgcttggagtctccaacattctaatggagagagctttctaattttatattttgggtattctccgattgctacaccatgtcgatcaattgtattaaccgtgaaagccggttctccgttttctttaaaacgtcttccattctgtcttttctcttctctttctggcgttaacactgcccttacttctttctgcttttctgcgattttaggttctctgtgaccgccgcccattgtagttaatgtcggtgaaagtccttcaggcgagtaaactcttttgatggcatcgtgaccttttaaatccacgtgtcccaccattaacggctcccttacttcttgtttttgtagcggtgcggttcctagttgctcaacaagtttcttcgtcttttcttcatttaagtaatacttctcatcaacaaaatcctcaagaatttctctcaacctctttgtgacagtgtcttgtaaaggccatttaaaattaaaactctttatatttatttcttgcaatctctttttacctttactcagaacatcgtttcgcttctgacctacaacccattgttcattttcaaccaaatcttctctaatgccaattatgtatacccgttcacgattctgtggaacattgaaaaactttgaattaagtagctctaggtcaatcctatagcctatattgttcatagtctcactaattattcttaacacttgtccattgccactattaattagcccttttacattttctaatatcacaaatttcggcttcttctcttctgctaacaaagctgtttcaaaaaagagcgttccccgttcatctttagccttagaaacagcttcacacttcgggcatttgactcccttcttataatcctcataagtaattaaatgctcgtgcgaacaattgctacacttatattccataccatcacggccgccggctactgaaaaagtgggacaaggaaatccacttgttaacaaatcaaaatatggaatattatctttcttagctttacttatgtctccaacattcaatgtttcacttacattatgaattgcacaataagatttgattgcatatttatctatttcactaaagccaatcagttcataatcaacgcctatgtttcttaatgcagcttcaaatgcaccaattccactaaaaaggctcattacacgtagtttactcaacaaacaacctccatatattttatttttactctaaataaaattgatcttttattttaatttctttagcactttttcaaactctgtttttgcttcgttcataatttgatataccttgtgatgaattgttgactcacaagaagctgacagtcttttaataaaacgttccactgttttctcctttctggataaatgagatattttaaagtaattttcgttcaatctcttcccaattcataacacgaataaatctattttcattcctgttatggggagcatcaaatagtatcttcattccttcaaatgattctaagttatgtattccatcatcgatcatgatgtctgctttaattatgtttttattgccacaaagcacaacattgctatgaggaataaatggaaaatattctgtaagccattcaagctttgctttaagggaatctggatggtttgttgctgtagtcacaacatacacttcatatttcttcatcagctcttttgtcactctttggctaccttctataacatttagatttctgaacaaatcgtaatctaaatgtctataaacattattgttggtatttgtatatttttttatatcccaacataggatgtctttctctttgagaaaaggatcatcgtatgtgttaatgtaagctacccaatcacttagtaaatcagctaagacctgatccatgtcaatcgcaattacttttttcataaattcccctattccactaaaaagattatgtctttagcaatttcgtcacttgaccattgtccagtatcccatgaatatgtatgtaatcccgcattgctcataacttctctgtacaactctaaaattgaatcaatgtcttttccctctatatactcatctccacgtaccctcaaccttttcttaataacgcttggatcagcgtgtaagtatacaaccttcgcttttgctttaattttatcctcaataaatctaagctgtcgctctgtaaggatcgagtaatctttgaatttctttgcatataccaagttagaataaacaaacctgtcaataatcacgttgtcttcatcagctagtttattgaagtgttcaaataacttctcatttccgcttttggccaactcaaagcttgaacctttgataattggatacttcagttctttacttagctttgctgcaactgttgatttaaagcagcaatcaggcccctccaagataattaatgtcattaatcctccaccttccttactttatgaaatccaacaacctggtaagtgccatcaggatactttacttctatctggttgtatcgataatcaactttcgcaacagctccaatctcatctgtaaaatcaacaattaccttttgaccttttttaaacataagctaaacctccctttagtggtgttaattcatgttctttaaagtaagtaatgtcacctgtttcatcgctaactgcatagtcatatgtagctgaatgtaaatgctcgataatctttccttttctccccacatgatgtgggcatccatatcgtgcattattgttaatttctacagctagtccaacaggataactccagtatttaggcaatttaataccacctcccctcaataaaaaacctcttaatcttctgttactattctcgaaacctgtttttcattaaacccaagggacgacaagaacctcttaaaatcatctagcaacaatctagggatttcccctttatgttcttcaataatcgacggtttataagtcttatttaatctggtcacctgtccatattcgtctgtgaatgacatttcaatttgaatacacttcaattatctcaccctattttttatttttgtcatgcattttaactgcttgttgccataacaacatcatcaaaacgtctttcatcataagttccatcataataacagagttctactgtttctgtttcaggatagatcgcttcaataatcccacgctctccagttgattttaccttagcctctttatccaaaatgaacatcctcttcactctctctatgtaatagttttccttgggataaatttcatgttatgtattgcatcgaacgaattgttgaaatgtttatacctttcagtcatttggatcgatttaccagcttactcttacatttttacgaccaaatgcatttgcttcttgctcactgtccattagaatatcaatacgattgtttttaatgtcccctcctgtatctattgcatatgcttgaaagctatttccttcatatgaaacttgcactaatgaatacaaaggaattacttctggatcaacagcaattattctttttccattgtaataggatgtgtttgatacatcgtagccggttcttgttttccctgtgcaccctgtagagcaaaacgcagtataagcagtagcaacaacttcatgactcttcactgcctttgcatttgtactttttgaaactgctttatcaagatttctctttgtattggttttttgcactttttttgtttttgtatgttttgctgcttttttattttcttctgttagatatgtaattgtcgcattaagatacttttttctactttcagcctgcttttcttcctcactctttagcctaggaaggattcttggaacgtcaatttcgtgaataagtttttgcctcacctcttttttatttaaataaaatgacttttttattgagacttgattatcttgatgtgtatacaagtttttagcgctatatacgagccctactcctaacaaaccaattgtagcaaaaagtgccattttgttaattctatgatatacatattttttatgtttgtctataagttttttgaaaatttttatctctcctatatcagttaagatttatatttctgcccttttagttgtcaaactcatacttccttcattatcaacaaaatctattctgcagactgtgtgattatatatgctatctttatagaccttcggaataaaattgttacctcttctgaaaccagtaaacatgagcaatgttcctctggtataccaagatttctcgattacctctttctttccgccaccaattgatctagaaatctgtttattgtaatgactaaagctgcccgaccactgtttaactgtaaccacccctgtaggtgttagaagagtaattgcatgtttgtttttatccctatctaaaacagtgcctataatccgtgtagtctcatattcatagagagttttccctctccattgataaggtttacctttgaccggctctgctggcagtttataaaagtcagcaatatcatacttggcaaagtttacaccagaaagctcatggtcattataataatagctcaatgaatccatttcccactttcctaatgacccatcggcgtatttttcccactcttttattaataaacaatcattcaatttcttcagtggttcttctgttgttatccaggactttatattagacatcttgttatcatattcttttttaaaagctttttcagaaatgacaagctgcccgtttaacatgtcaactacactatcctcactgaaatgctggttataaaacgaagctgatacatcgtccaataaaaaaagtttatcttttggcgactttaatgttttgtacacctttttgctgatgtaatctttaaaacgaaagaatctcacttcttgtgcaaattctgaaggaacaatgttgttttcaattagcatttttaaattagacaacgtaagcttactttttggttctgatattaagctaataaaggccttcatgatttcttgcctgtttccaaaagaatcaaagcagcctccttttattaattggattacttgtcctttcttaataatgccgctcttaaacattctttcaataaagtcgttaaagtcactatatggtctatttagaactatatgatgaataacatcgtctccaattccattcattcctttaagtccaaataaaattgaattgttgttaatatcagtcctaaaaccaaaatcagccttatttatatctgggaggtctattttaatccctctttgtctaatgtttccgatggctgaagcaacttttccgtagtttgtagcagctgtctttttgttgtcttttgtatcctcggtatctattcctccgctgtttaccgttaaacaagcagtattccagtataaaggattatatcgatagtttaagttcaattcctgtaatgcaataattgaatatgccaaggtatgaagtaaactaaaactgtagccaaactgtcttttaaattgaacattccagacataattcaacaggttatcagaagtgccaatctcctttccttttttaaaaaacaattcttccacttcttttagtacatcttctttcttttttgctatggatttcctaagataatttgattctttaatgtcaaagttagctatatctttatccataaccatctgcataaccacttcttgagtatcagcaacaccataaatgtccttaaggtgcctctccattactctgatttccttttcgcttagaccgtaccgtgtcatttcttcataccatttattaaggttatttttgtatttaacatatgtatctacaggctgttcttcaccgtctgacataagcctcattaaagaattggttactgctgcttcaagtaagttcttaggttttactttgacaactgattgatgaccgacttcagttgagaactggaataaatccatgatttccccattaccagccatttcccatagcttatcatcttcatactcaattacgtctggatggatgtatttgttgtatgtttccttcaagcttccttgccattcaatttcattattctcgattaattggtctaatgttactctaatcttatctaaagcttcaattgtaagaaggtcaaactttactgagcccatggcttcactgtcacccatattaaactgtgtaatataagctcctttaggagttttcatcattgcattcgactttgtatattcatcgttaaagataattactccggctgcatgagaagagcgcttattagttaacccttcaatttttaaagctgtttctttaagattagggtattgttcaacctccctaataaactctttaattggcttcctgccagtttctttgtcaccataaaaacaatgcttcaaaggccagttagatcctctttcaaatggaatcattccacttaaatactgggatatatcattatcgattcctaagcctctacatgctgtctgaagcgctgattttgaaccctcagttccaaaagtagcaatttgaagaacacgcttgtctccaaacctttctcttagtgccttaagaattttttgtctttttgatccttcagtatcaatatcgatatctggtaggtcaggtctcgatttatgtatatgtctccaatgtggtaaatcatattgcattggattaatttgagtattgtcgagtagataattaactaagtaacctgcagcacttcccctggctgccccaactaaactatctcctccacactcatcatcccaaataatattaatgatttctctaactgttatgtaataagaagacatagactgattcagcttttggctgatttcccaaagttcacccagttcaacgttaatcctgttcaatattttatgaaaagcttctctcgttagttcgcttgtttttaatttctcttcaaatccgtcctcaattaacttaaggagatatctatcttgttcatctgctgattcagacatcttttttatatattcatattgatcatatgctggtttaaataaatgtcttaatttaaagttaggaagctccatcttagggataattggttcgtgctctatagtatagtcttcaatcatctcaccaatgagcattgtattttttatggcctgatcgatgacttctttatcaatgtagtccattctctcgtgaatttcatcaacgttttgaacgaaacaggcttcataaaaggaatcaacttctctttctccatccttagcgtttaaaaaggcttgatgaattgctctatcttctggtcttagatagtgagcatctgttgtaacaatcatttgcaagtcatacccgttggctatatctatcagcttcttgttacagtaaatctgttcttcactcagtgcaggttgaagctcgataaaaaacttatccttcccaaaaacctctatacaccaagttataaactcatgaatctttagtttgtgctgcttaattgactgagaatcaccagtttcttcaaaagcctttatctttaacaggtgaatgtttacctcagaccccaagcaagctgtggtagcaatgatgtggcctggatctttacttaatagctcctctacatccttttttactgtcggcactctttccattgttcctgtataaaatgagttttcccaggcttgagaagacagtattcttaactgctcatgtccttttggatccattgccaacatcaagaaatgcggaaattttgtcactcccgatttatagttatctcgaacttcctctaaagaatcgactaggtacgcttcattgcccaatatcagtttaaaatcttctggcatatcccccttctttttcatttctctaactgttcgaatagcatctaaatgtgctgagaggacttcatggtctgttatggccaatcccttatattccatctttactgcagttttgagcagttctttaactgagtttgttgagtctagaagccttatgttactcctatctgtgtgacagtgacatcctatcaacttttctcccccttaaaacacaagttctttttgttttgtgcgaaccacctccaattcataaatctcgatttgaggtgttttcttgcctttgtattcatttgcctttgctttgccaattacattaatgactaacgttccatttgatgcagtaagctgattaaagtaattctcatcacttttaaaccttatgtattcaatatcgccatgcttaaatttaacagttgtcttattctttttccctaaatgctcaatttgttcgacttcaatttcaagatccgttatagctattaagggttcttcaactttgtaaccccaatagtctttgtaaccatcaagttgaaggataaattcttttctcaatcgttttgctgggatctcaaaatcaacattctgaatatcttcttcgatatttatgtctttaaatttttcattcagcactttgttcaccaggattaagttctgtcgtttaattgcaaagcccgctgcatttgggtgaccttcaacaaactcaaataatccagtatctataagctctttcttaaaatcctttataaaccctttatcatatcctcgtatagagccactcaagatatctttacctttttcgggatcgtttctggctaacaagaccggctttttatattcttctgcaagctgattggccaccagtccagttaggcttttatctagaattccttcaatgtaaacaatgagtactttattcgctgttaaacttttctcttctattctatttttaatttccactccagctgcatctacaatccgtttctgctttgcttttagatttcctagaatcctaactgtgtcttcatgtattgatacaagctcagtttcactttgcccacgttttttgtagggaaccttttctttagaaaggaggaatgctctcatcatttgatctttttcttcactgcttccaaccctaatggcagcgttaattaaagggttaataaagaactgtgtattctgtatgctcttgtcacccttggttgaaaactcttgcttcttaaacagcttctttaataatggatgttttattttcttcaagccttcattcataaaatacctggtttcaaggtttcttgaatcagccgaatcagcaatgttaccaatagatacaaggtctaagaattgttcggcttcatttttatttagcttttcatcaattgcctggcaaaatttataggccattcctgcacctgtcagagttttattcgaataattaggcgaaagttgattatttactacgatcgcatgttcagacactcgttcacattcatggtgatcaataacaattatttctgtgcctctcttattaagagcctcatgttcctcaaattgacttgaacctgcatctgggattatgactaagtcaacatcatcaggaattgtatcaataaaaatcccatgctctttcccatcttgaattctgtagtgtatattagctttcggacaaatcttctttatgtaatttataatgattgagctggatgtgtatccatcaacatcactgtctacctgaacaaacaatttatttttattatttaaatgcctgataagacaatctgcagctttatcaatattattaagctttgaataatgaataactgaactttgatcaacattaacaaacaactttggatcttctatgcctctattttttaagatagtagctaaaggatcgaaattataatcattgtcgccaattagtctatactccattaaattcccccttcatctgtgccaatctcaattttccttctcattagctcctctagagtttcctttcccttgtccgctgggctgtccttataatccagtaagccttcataatcccacaaaacatatacacgaacataaggagtaaattttgctgcgagctttagaattttcttctgatattcaaccagtttttcttgatatttctcctctgtttcatgttcttttggtggtcgatatttatcaagagcaataaaaacttcttcaacaccaagagacaataaaatgtcacggtgaaaattagaaatattacttgaacaaacagcacaggtgaagtttgattcaccgtaaaagtcttggcattttaatactgatttttctgattcgaaaatcaatactttcttgaacctttctatcgaattttttgttttatgtaatccatatagattcatcattgtttgatggttatataagatattgcctacttttaaaggcatatatttatagcctgcatcaacttcttctttaatcattgagcgcctacgtataccaatcaacctattatttaaatctcgatgaggaatggtaatcccttctgtatgaggtctaaaataatacccaatctcaaactcttttaatgtcttgtgacttattccctcacctagccacaattggtgaggataaggcacaaatacatctagaaccgtttcattaaagctggggagctcaatatgtatttttttcttctttttgaacttccccatccattcccagtcatcaatcaaatcattgtttatgtatgtctctctattcccaaatccaaatgttcttcctgctattttggcaacatattcgatagcctgattaaaagagatattaattcctttttggctttttgctcttataacaagttcgaatacatcaaaattatccccacactctgtataacagtgaaactgttttgcttcatgatagtaatacagcttatagctcccaccagaagcattgtgacaaacggttctgtaaattggatttccttgttgatcccacagattgttctcgctacctaaatcttttaaaatcttatgtatatcctcaatggttaggctttcttttactctgtctttatcatacttcaaagggcgctacacccctcatcctgcttttatattcaatttctcaactgtgattagttcattgtcaagatttgttgtgaaacagtcctttatccgcatgttgcccatattgatatgggagaagactttaactttgtcatactcatttcccctatttttaaatacatgtgtaacaaaatttggctctggataaaatccttcttttaaaattggatcaattgcatccttctcttttttacttaaaggaagaattatcattgcagcatctgttttatctgcgatggccttacttcctctcaagtaagaagcatctattacttgtccttttaaccatgcttctttccaatcaccatttagctgagttgcactcatcatatagacatcgtatttgttacataagccttttaacttatctgacataagtaaaagaatttggtcttccctcaagttgacaccgctttttttgctcatctctgaaaaaatggttactgatgagtgaatataatcgaaataaacgtactctacattgtttttaatgacgttcttttcaattgttctttcaatctcctgaatattaaaatcaggcagatgttcgaaccatatgttagactcttgaagaaccttagcagccttacgaacaagttgtttttctttttcattgattgtgtttctaaggatttttttctcttctacactactaatgtaggcaagtgctaaactttgcaattcttcggccatcatttctgttgaaataactgtagaactttcactccatgggtttgatacccattccttctttttaggatcataaagttcagttgcacttaagcgacaagcgtcagcgaccatgtttcttgttttaccgccacctgtaatacttgagcgcagatagaactttttcttccgtgatccccgaaaaattgaagtaagcatttcgctatttaatggaactccaatatccggcgactcttcgaatgaatccaataattcattaataccttctccaccctggattcccacactttcagatgaagttctgaatttttcttttatgtctacaatcttcatttcataagctgtcaaaatttcatcaatcgacttcttatcaaactgttcttgcatcttttcttgttcttttgggtcaatcagagattcatcatatatttccttaatatcgaatcccaagccatccatttctctaagcagactaaacttttttaatcttttatagtggtaatcaaagttttcgacaactgccaactcttgtattttttctatatattcaagacccttattatcatggaaaattttatattgaatatcgtaatcctttagatatccatctatttcaacgtcattcaatacttcagttccttgatgaaataggttgctcatggcaaaaaataatattgaatgaaaccttgaaggaaaatcatccgaagttatcttatatttattgctctctgacaagattgtgggatcttttaaaatgctccctaaaacttgaattattgcctgtttgtcttgtagcaaatggactctccttcctatagcattgagatatcaactagccctcttttctttctcattcctttttttatgaccaaagtaatttcttctcttttatgattctttggatcttcagctgattttcggatggctttttgtctaatgtaatgccgctttgcttcatcataaacaaatggaacgattccaatgccatcaccttctctgggttgattatccaaagtttcataaaagtacctaagcgctagttcaatgcctttaagcttatacccatattcctcttgaaactctttaatttgtttcaacatcatgccagttggagatgtaagaccatataaattgcatatgtattgaattaactcttttctgtgatctgattcttgcttccaggtattaaaacacttttcatggtaatatctttttttataaggaatggctgagtctttgtctaacttggtctcgcaataaggacatttaacttgtctccccaaataatcactcctaataaggaggagagaataatctctcctcttttattctgctagaaggtcttttagatcatctagaattacagacatgacacctacttgcttacggctgcactcagtaacttttacacccttacctaaatgtttctctgtaatctcattaacttcttctaaacggccttcttcattaagcttcatgccaatttctttaatttgatccattaatgagttgaaatcaagttcttctgaagcgttgttttgtttttgctcttcgtatgtaacagcaacaattccttctgcttgctcctgtctttcgactgcctcaataattgctttttctaagttttctgcagtaaattcaggaagatacgtgtcaatgtaatcaaatcggctacgagcaaaatgctcttcagtttcagctaaccaagcacttgatttgattacttttctatcttcatcaacaccattagaacttagatagagaacaatatcgctgttatcaattactggagctaaaactcgtttatcccccttcggatatactttgccttttttgtcttcagcagcatgagcaataaagataaccgtaaatcctacgccaattaatttattgatttcttcccatacttcagtttcatactctttccaaaggccaaacccatcattaccatctttaatccgttctacatcatattgctcgcagacatatctagtcgcatatttagcaaaagcgtctacttcatcaacaatgattgtttgatacatctctttggccttttcagcatttttggttaactgcttgtttacctttttaaaatcagcccaactattgataggcatgaattggacaccggcaatagcatttaatcctttttcgaatggcagatataacggtttcttcatccgagtgctttgcttagttttacctaagttgttagaaccgtagattgtgataacttttccttctaatccttttgctactacagaaacttgtgggttgaaaatatcgattgccatttcagttctccttttattttgaatttgttaggtgagtcggagctcaccccagttatgtattagattaatgatctattttattttagaaagggagatcatcatctgaaatttcaaccggctttgaaggcttgttattaggagcacttccaccaaacccagactttttattgttttctttatttccttctttcttaagctcgtctagataaatctctctttcagtcaacgcttttttaattgcatctgcattaaaagcattcttactatcctcatcataaggatcattaccacctgtaattagatactctcttcttgtaattgaagtaatttctttcttatcttctccaaatgccgctactttggttgttactttttgttctttataattaatgatcttcccaaaaacgttaacggtagttcccttttcataattattttcaacatattgtgagccttcttttgtgactacaaatgtaaaaggaattacttttccgttgtacacaggaatatagccatttaaattaactctacctgtttcttccccttttactttttcttcggttacgttctttacaaacacctcaacatcaaattctgctctgggattgaattcttcattagcatccagtctgttcacaaagttagccattaattgtggatatgatttaaaaatcccgtgtgaataatactcatttaagctaattttaccttgagtaattcttactttgtcagcttcatctctaccgtgttttgcgattgacttatactcgcttacaatagtctggtacccctttgcaactgcattatcagtaccatcatctttcttatacttggaaaagcctttaactgtatgtacttcgttaggtgcaacctcaatgtctaattcaatatttagtccatttccatttttccattcagtgtgtcgtacttcagctaaagttccttcaattgttacaacgtttgatgcttcacgtaataccgttttgttttctgtcatatttttaatcatcctctatttttatttttgtttattgtgatttttctttgaatatgtaatttttctaaacttgcagtctttgattccaagttctttactaagttctatgtaccttctttttgggaacttccaatcattttggtcagaaaagcatcctgatttatttacaatttcaaatacctgcttttttctgttaactttgattatcatatttccgtaagcgtactctgtgcaaaataaacgttttttcactcgctcaggatgagtttctttgacaagtaggacattccttatcatctttaacagtgcctgatcaggagtaatggtcttgttgtctttaacgttttctctgtaatagtttaacgctttctctgttatcccaagtacctccaagtaattcgcctccttccctttaactcgattttattatatacatattttttatctttgtctacatgttttataaacttttatattttttatttttgtatttcatttgcgctctttttaattcgaataaaattatcattttatttaaatttaaaagccccaataagggactcttgttagtttgttccttcaaccttactcgttaagtaagctacttgtttttctaaatcagcaactctttcttcgagagtttttggcttaggtgcatttttcttctcttcaagctcaattgctgctttttcaatttcctctaatgtaggaataggttcactttttctccaggcagtaaagatatgtcttccgttgtcatttacaaattcccaatcataagattcgtctgaacgagggaacatatacattaaaacttccggaagaattgatccatggatattccaaatttctgatacgtcttgtccaactttaaactccacaaaaacatctcctcaattatcaatttcttctatattctatcatattttcattatataggtaaagagtttgctattttcaaacaagctcactccacaaccacatatccattgtttgcaatgaaaagccatcaggcagctgcttcattttcacatttacattgtatcttctgcctgttgttttatgtacaatagccagttcttctccattaaagaatcgcacaatggcctcatcaaatgcaattggctgattaaccacataaccttcctttaaagctctaataaacaaatagggatcatttttatacagctcataaagaatgttcgcatattgctcgttcttgtctctaagtagttcaaaattaatcaacggtatgtataagtctttgtctgataaatttaatttgtttctaaagtatttaattgcttcatcttgctctttagaaatgatgtttgacattcagttaacccctttattcgtatgataactaggctaatcttagagactagcccagcattgccttataaatattctactagaccatcgtctttagccccttctgctattagactataggcagccagaagatactctttgattttctctttagtttcttccccgaatgcatcaaaaccaattttaacatcgcttgagtaattaattttcctattccctacttgaactacattttcctttttaatttgagcaataaaataagcatttgctaggttctttcctaaatactcctctgttaatggatcataatcatcgaaaacctcataccgtatttctccgattctaagcttctgctcactcatactctcatcccctgttttgaaatttttggtactactaaattatataccaaaacccataaagggaacaagtgttctcgttaagaattttttatttataatcgattactgtatcatctaaggctaatctaggtgtgccgctgtcgtatgtattatgtattaaagttgtactggaagcattaaacgttgcaaatggatgcgaaagcactcttgcaccaataccttgaacatcattccttattaatcgaaccttttttgtcccgtttaaatatattccatagccttgatctgaatctctgttaaacataatttcatttcctctaaccatatgctcagaaccgcctattaagtggatcgcaatgattgctttgcaattatagatctggttatcacttattctgatattgtacatatcagctgcccccataattgcaacatttcttggttcaaatatctcattccttgttaggaagacttctgaatctttatcccaatatatcccgtaaccttttccactcaataagaaatcgtttagcttaattctgactgcctgagatctctcacaatatagacctccgtaaagattggagaacgtattatttaagaatttaacgtcattcgaatccatcactttaattgcatatgctgaagttgtacctttccctttattattgcttactttaatatctgatgaatttctcacctggatctgaatacaatcgctgtcctgtattctgttgtttgaaatggaaacatcttcggccatatgtgttgctattgcacaatttgaagcgttctttacggtattattatcaatcgatacccctttccctctaatcatcatgcctattttaaacccttgaatattgttatcagttatttgaattctgttgccagtctcagtgctcgaaacacctacagagtctattccgtactctttagaccccccttcatttattatcttgttacccttaatactcacatctgtactgtagccatatgaaataacattgtcacagtagttatctttgatggaaactttaccgcttgtatgagcagtaaccgaaccacgaccattttttctaaacctgcaatccgatatcgttaactcataaggatgatcatactttcttccgttttctccgtagccctctaaatcaatacctagttgagggccaattgtatctcctccagcttcctctatatcacagtcttcaaccaataatccttcacaaccgttagtagctaaattgttccgtctccctctttttagttcgcattttcttacggtaacacttttggaaggcgtataaaccatccctgggtaattcatcattccgtgagctgcaatccaaatgttgtctccaatacaatctgagatttgtacattttcaatcaaaacatttttgcttccatgaacatgtattccaaatccccattcatgtgtttttctatcggtatcaattagagaataatcatgttgataccggtcacctataatacgacctcctctaattattacgttctctgcaagcccaatataaaaacaagaatagccctgatacccattagggttaacttgaaacactgcttctggatccaaaaggagctccatatttgatgggattttaattcccccaccaatttcaggatttcgttgatttaatgtatttactgaatcaataataaaattcccttttggaacttcaacaataggaaagttgttctctgatgcatatataagagcttcattaaatcctttagttgtttcaattggattcgagttaaatgcatttattccccactgatcaaagtcaacatagtatcgtatggatttattcaacaatgtcatggtgctacaccagccatacaatacacattttcattaatgaatttagttagaacagcaatatagtcataaaaaacttgattctgcgttccattgcgtccagccagtgtaaaagtattaaacatttctcttcgttgttcagtgcttatttcaagttgaatactcataccagtgctatttttattagcaatgttctgctcatttgtgcctgctaaacgggaatcttcagacagtaattctgcagaaaagcctgcatcggtaagtaatgatgtgatctttgctgctttttctctgtctgtcccaccaactaaagtgtgtttcttacttgatgcatacccatgaattgagattgttaaatcatgcttactcaataaatctaaagcttgaggttcatcgaaattcgtacttgtaatatgcaactcagaagctcctggtatccttaaaccttcaaatagataggcagagtaagacttacttaattctcttgcaagctcactagtccctccttcaatacctccaccatggggtgccagaataagcactctcctgtcaacatcggtagttagaatgttatagctcaaaggtgactcattttctttcaactcttcaaaattactatacttatctgcagctagaactgaattgggattaaacaatgcaaacaatgaagtaactaggattggaaaagacttcttgtctgtgatatacttatatagcttcgtaaccttgcgaagtgtgcggtagagaaggactggcccgccaaagcttgccttctctgcccccttaactcttttttctactattctgtttttaaactttaacaatcaacaactctccttaaataggtttatttttattttttactttcatcttataagcaatcacattagtaccacccccttctccgaataaaaaattacttttatgcagactcaatactgatgccagtatcttttaacaattcaatttgttccgatggaatatccgatttcaccatactccacccgactaaggtcattccgtaataaagatcggttagttcaacttcatcattcaactcaccttttaatcgaatcattcgatctttatatttttcatgaccaacaatatcaaagctctgattataaattgcatatgttttaccgtttgcttcgttgtcttgatatggggtatagactgccctgccgtcagacaagctcggatcagttttcaaccattcatatacctcttcatcagattgagcaagcaaatatgtaaagataccccgctcacttcccttgggtgcaaagtgctctaacataatttcatataagttcatttcaattacctccctggattctggttaaaatatcgtttttatctagatttctgtttacttatttcttctaattttatttttatccaacaaatcaataatgtaagtttcaaacatgtcatcccaataaggatctgttctcgctatgtatttctttgttcttccgttctcctcaatcttaaaggtttgccccttttgaatatcggtgaactttttctttctccatattcccctaatcaacacatcaacttctttaacctcaactgtttgctgcggcatcacattcctcctttttgattttcgtgtatcaagcctgtacaatattcaaaaaccctaaaggatgatgaacatgtgtggcaggttcactttattttctgagtttgatgacatcattgagcaattcaatatagatcaattcttacctgaaggtgaatatcaccctagctataatgtcgctccttcacaaaacatcctgacaatcatcaacgatggatccaataaccgtctgggcaaacttagatggggtcttatccctccatgggctaaagacgaaaagatcggctataaaatgattaatgcccgtgctgaaacattgtccgagaaacccagctttcgaaagccgctcgtaagcaaacgttgtatcataccggctgacagtttttatgaatggaaacgccttgatccaaagactaagattcctatgcggattaaacttaaatcgtccaatctcttcgcttttgcaggcttatacgaaaagtggaacacaccagaaggcaatcctttatacacttgcacaatcattacaacaaagcctaatgagcttatggaagacatccatgatcggatgccggttatccttactgatgagaacgaaaaggaatggctcaaccctaaaaatactgatcctgattatctacaaagcttactgcagccatatgatgctgatgacatggaagcataccaggtttcatctttagtgaattcacctaaaaacaattcacctgagctcattgaatcccattaagtaccactgccatatcgctttatatatcaccttcgcttagctaatatgttctaagtaggaggtgatattttgtttgtatcgccaatgctattgcattcaataaaagagccttttaacgacgagaactatatcactgagctcaaatttgatggaatcagactcatcctttctaaatttgataatcagattaagctatacactcgtcacaacaacgaagtaacaagtaagttcccagaactcatggacttagatattccagatggaacagtgctcgatggtgaagttattgtagctgcctcaggtggtgctcctgactttgaggctgtaatggaacgttttatgtccaaaaaatcagctcataatattgtttactgtgtctttgatgttatctacaaagacggtcaatcaattgcagctaagccactcactgagcgtaagacagttctgaattcacttgaactggatcatcctaatgtctttgttatagagggaactcaaggtaacggtcttgcttacttcaacctggccaaagaaaagaatttagagggaatcgtaatcaagaaagctaactccccttatgagatcaataaacgttcgcataattggcttaaagtgattaattacgattacactgaggttctcataactggctacaccaaaaaggatataaaattccttctgtcttatcctgatggaacttcagctggatttatggaatttatgccacatgcagaacgaactaagttccactctatgaaacaagttaagtctgaatctgatgaatatgtatttatcgaacctatcttatgtaacgttaagcacagatttaagactaagcacggtaaactccgcataccttcctttgaatcctggagagtgtaatctctccgttacataacttcttagagcctagccttttaaaattcaatgaaaatttagtacatggatcaattagtattcatccattcatcgaagctataaggataatcaacagtctctataaaccctatttcttttgccttctgacggattttcatacatccttcatagctgtaagcccatatttctttataatccctcagctcgccgcatttccctgttatgatgaactttctaaaactgttgaccagttgccacatgttgcctccatgcgaaaagccgtttggactcccgtatcccatttcatacggataaacgtcatcacccgtgtaatcatcaacgaagaacagttttttcttaaacctgaaatacgctatacgatcctttgacttgcggtagaatgtacgatgatcaatgcttgcaataagctttatcagatcattaatatcgttcatgcgttttatttgctcttgatttggcactacggttacctccttccattaaaataaatattttattttaaatgctatttttctttaaacctttttaaatttccaagcttcatttcacctttattactgcaagcaggttgtcatacgcttgccatataaaagagactggacatttttgtctcggaggtgaaataaatggaattaatcttagattgtttcgtgaattggtcatttgacaaaatcatggactacatcttaattgcaggactttattttgtgttcaaatcgaaatctaaacagaattatcctgatcacttcgaagaaaaacgccggcatagaaattaatactttatgatcgttatcgatacgtgtgctttttcgataacgatccatcctaatatgtttagttaaaaactatcttttattcaatctctatattcaacccagttgatccaactttgatttccctcatctctccaatctgtggcatatataaatgtttcttttcattagaaacaatttcacccttccaacaaccgttttgcacaaaggattttgtcccgattggtaaagtttgaagatctgcgttctctatgtattctccctcctctctataaatatctccttgttcagaaatcctccttttcgaaactttaatgtcgattttgtaaagtgaattttcatcctcaatcattaatttatatagccaatcagttatttttgattgctcttcactaccgttaaccatatcgaaaatcttcctgtacatgtcattcctcttcttttgaaaaatacttgtctaccacttgtttttctaagtaaacgacaccgtctatcaatatgcctctatgtatatctacatcttcaacagtaacggttccgcctttccagaagttatttaggcaatcttctttaacagttaatgtttgacccttataataatcattcgaatcttctttattactattcaattcaagaatctggtcattaaattgaattgtcacaccatcagcaattatcttatctcgcccaactttacttagcgaatccgctaaaataacaaactcctgattatattctcctccattaacatccactgtaattgagtattgatttctttttttcattgatttcccttccgaccccatcagcttgtctaatagtgtctaacaactctttcttcttgaaataggtcttttccaaacgatttacttccttttgcaattcagtagcagcatcatacttaacgatccattctcctactccacagacttctctttgttctttctcaaacgtttttatgtgatggccttcaaaccaaacccttactcttgttccgttttcaaattcattattaaaagcagctgctttctcagttcccgcataaatacatttatacttgctgtcatcgactacataagtgttcattatctccgctcctttaaatcacgattttaatttaactttaatgtgtatcatcttgagaaaatcccctttaattggtaaactcatacttaacttacataagagtaggtgattccttgagtaaaacaatcggtattactggatttttcttaagcatagtagtgcaatcattttcggcgaatgattcgctatcccacaagatcgctacgggtttattatttgtatcaatagcaatttataattttgaccacgctaaagattattccaaagcatcccttgtcgtaatatgcctcacctttttcgtacttgccttgggtattcataagcttctttccttttcgagtgacttatttgacaatgtgaatataaatttcggagtaatattcatcctccaaatcacattaataattggatctgttgcaatagctatcagtataatgaaatttatctgtgatcgtctaaaaaagaaacctaacggtaaagagtgttaattcctctttgccttttttatgctaaatacttcttcttatgtggtcttctatgtacaaaatcaaatgctatatcaacttttgcattttccttctcctctgctactcgctccgtaacaacgattagttgtccattttcctggcggtcaatgctatggactgaatatcctttagcagcgtaatattctccgataatctcatcaacgtggttgctaagcagattcctctttatcaccaacataacctccacttattttatttttattctatagttttttatgattccatcctataatccatctctccatttgccttctcatctatcacgacattaaccgacacacaatttccatatgtatgggagtaatttcgctattttgccttctttaaaaaccatataatgtaattgcaatacattaaaaggaaatggagatggttcaaatgaaattaagaaaagtattgactggttctgttttatctcttggattactcgtttctgcttctcctgcattcgctactagcccatctgctatggttaaagagaataacattgttcaagacgaaataagtgtgaaagaattgcatacaaagtatatttaccatcacaatattaatgattttaaaaatattgagaaagacgaaaacggtagaaactggtacttaaaaggcattgaatataaagatggatggtatgtagggaagtaccaagcaaattattgatttatcgagggggtgttcccccctctttcatttttaggagattttttgcgctcaatgttttcaaattcccctctatttacttgtgcaagtatcattacagtatcaattatgtatttgttgcagcctatccttttgtcctccattctgaatcttgtcgttcctctttaaaacgatttagccactctttgatctttagtaatctttcggatgaaaagtttttgtttgatgagttgtaccactcttcaaatgcaaagtcgtgctttgagctattgcaagatttacaagcaggtatgcagttgcttatatcattagcccctttgtgatctacatgctctttatgaaaatcactttgtatataggttcctttgaataatatcttatgatcttcaattttcagcccgcaataggaacacttgttgttaaaatagtctttgcacttttgccactgtacatctgtaatgttatgtttcttgtgagcatctctttgtaaacggtagttttttaattttagcttgttcttttcttgccagatttgttgtgtttttttctttttcaaacttgagttgtatttctttttggcctctttcatccctggaagaagatttctttccctcattcgttcaagctgtttgtcataattcttcaacatgctttctttagccttttttaatacacaagctttacagtatgaatgaagtccatccttatttttcttcacagagtaaaaattctcttcagttgccggtaaccagcttttacaacttatacaattcttgtgataatatccgtttattattttatgctttttactatcaattaatttttcacctatattaattgccccctgctctttagtctatctgttaaacacataatcatcagttaattccctcttgaatcgataaaactgttttatttgatttagatcaatcccaacccagcaattgtccaccatccacccttttggttttaattcacttacgaaatgctttctggcttcaatatcatcagaatatatgtacaatcgttcttcatatgttctttcttctattagtttcagaaaagttcacctctccttatcatccaacaaaatacgtaatatctaattcaaaattaaaatcaggatgaagtctccatagctgatgtcctaagtaagttttcttggcgtaatttaagcagtttcttgtaccacttttacttccatcataaacagctactattgcctcactgtgatcaatcatgtattcatttcgcttttgcatcttagctggcgaaaactctcctggtttctctccactaactttatatttatctaattcttcaacattaataatctcatctgctacattaagcatacgtttgtaccacattttttggtctgcagaccaaactttatcttgttctttgaaaggtgtggcaattatgtttttgatatgagggtgtttcttctttagaatatgcacacaccaacaagcagcctgatcagttcctaacgctcctccagttataaacctatacttgttttccttagtgattaattcttcaattactgcaagcagcttatctttgagtttaagcattgttggatttttcatatcgtatccacccaatttgttcggcctatgaccagtgaagcacacagttttctttcttatagactccttttcttgatatatccgctcacgttcatttctctcaatttccatctgcttaatatattctggatcactaagttttttgaaattgactatcggttctcaccctttctttaaaacagtctttttattcaaccattattaacagacctattcatactcaacaatgacttcatggttatctacaaatagatcattcccatttgataagtgtacccagaaagcttcttctggttcttctctatagtcataaatagcaattacctttgtatttgattcatcatttatcggtttacctacagttatttttgtgttttcttcaggtaaaataatcgatttaatcatttacatcaatccaatccaagtttgttttacactgttgccccaagacattcaataacaggactcaatatttttcgttaatatacttggccccaacttttgtgtgctagaatttgacagacgcacttgcactttaacattcttcatttcggccgaaattgtgtcaattcttcccgcccaactaggactctcttcctcaggagtaggataaagtttaaaccgccaactaatctcacctggtttagtagcaaatccttcgtaactgtcgtaatttccaaaagaagaaggtgcaggaagatggacagcaagaatacttatattggttctggcagcactcggtgggttcaattgcaccttatagattaatgctacacctttagcatttttaagatttttatctaccggctccagtattacactgcaaggcattggactggcgtttgtttgaatgggataggcaacaataatacttaaaaaggataaaactaaaataaatcgtttcattgaaaattcctcacaatttttttagttaatttcccttatttctggattgattattcatttgtatttgattaaaacttcaattttattttgatttaatctcaacaattagactgtcaggatagtttttcaaatcaagtgcgtttacatgacagtgacctacatatccttctttatcaacgtaattataataaaacttttccccattattaatgataacttcgccattatgtgtatactccatctctgttcctttataccaagttacttgaacttttgtgccaggtttgattttatttaaatcaaatattgttatttcttttagcaggttcattttctccatttttattcccccgattctcattaaacttcaattagactctgtttttaatcccaattaaaatgtttgggtctagcgacaaattcgtagttctcctcccaatcaaattgtctcaaaccatcttcttcaaattcccagcattcgccgagtaaaggatcgtctaattcaggaactcttttttttaaagttcgaagtttgttgagatgactagctgttttaaatttaactttatccattggtgcaaatttcatttttccatctactttcttttaatttttcttatttcaaaacgccatttgtatgcatctgtaccaattcgattgaatagctcttttcttgcttttgtttttgaaggctcctcaattccaaagcaaaactttcgtgatctagtactgtaaactccgtataaaacattattctccatcttccatcctccgattctctttaaaattttacttttatctaaagttttcaaatctatgatgctatttctcttttgtgcccatgtttctttagaagatcaacaataaaatcggcacctttaggagtaacaagagtaattgttttaattccaacacttgtctcctgggtcttcacttgaaagaatcctctttctacatatttttgatatggggcgtttttgtttgttccatcaataagaactttattttccctcaaaaagcgaaataaattgttttggcccattccttttatgccaattgcttttgccacttgtcctattttcattaatccatctgtattaagaaagcgatcatatttctccacttttggttcagccaatgttaattgctcctgcaattctcgttttgcttttctttcagtgaaataagcaatggcacgttcatcttcattcatatctagatatgtatcaattagggacggtcttgcttttaacgccttctccatttcttcaaatttagaaacatattgagctgtgaataatacccctttagcaccagtcattttattagcaaccatatcgcatccttttcgggttaaatggaaatgcttcaatgagcgaccagttgcatctttatatgtactttctaagaaaaattccactgaacgcaattttgcgtttagtaagatcgctacatatccatcaatacttctaagtaaatctgtatgtctcttacctaccatctctgccacttcacggctgtcaaccaaaagctgtccattctgttcaattactgttagataactttccattaaatacctccgtctcatttaatttaaaatgcatcttttatcacttctttgcagcatagctctcaaagaattcttcaactgatcttagataacggtatttatttggatcttctgggtttctgaatctcttcgataacaccaatgaccaattaaacatcaatggggaaaatcttgcccatttgctaaagcttaactgtaggcctttccattccctacccgctagttctgctaattctagaatctgatcttcttttatgttcacttcgtcttcaaacatcacttgaatttcttcgtatggtttatgcccaaaacaacagtggcgtgtttttaatccaattttgaaatttaaaatatcaattaaatgaatcatttgtgtatcaagttcatcatatgggataccatttcggatgaatttttctctttggtttgttttcacattaacctccaataacagttacacctcctggccactccacgcttcaaatttttctattgcagccttttgtttattttcatgattaatttgctcctttatggagttttcatagttaataacttcattgattgccatctgtatgtaatcgtaatcccacttttcttcgaaataactcggagcgaagtctccttctcttgtaagacacttgaatttttctttcctgaaaaaaccgcgcacctttttatataaagatactttgacaaaaccttttgagtgtctatcgttataaatgctaacggcatactcattcccttcaactgatgtcacgggatatttgtgcaaatgaaattccttcattccacgtcctcctcataaagtcgtttgtatctttgaactgcttttcctttcgaatataaaaattcaggtttatataagattaaaaccggtagtttgtctatggtcagaacagtgttgtcgtccttatctacgactaattcagcccgttcaattgtttcctccaacggtacgttacagtgttcaaatgcttttttaatctctgcatcgaaaacccgtttctgttcatcaaacgtcttccaaatatcattttgccagccttcaataggtgcagaattaaccggaaatgattctccatccggcgtaatcattcggaacttcaattcgttgttatctatttcctccatcactcaacgccctccttatccccaaaggtattttatagcactaacaattccataaacgatccaggatgaagcgaaaaacaacagtctccaattttgagtgacgatctgtttgttctgacattcgaccgtctgccctaattcctcattcctgcgacgcaattccttattttctttttcgataacgtcgatctgtgcctgtaattgcatttcacttgtcactccgcgccctcctttactctttccattggaacccgatatttaaattcacctgtttcggacttaatatcttaattcggctccaatcttcaaacaaacttttcaaatcgttctttgttgatacagttttaacatggaacgtctctaaatcgattaaatgtatcttatttctatttgtaacatccattttcacaatccaaacatcgtcatttcttaaaatgaagtatccatcttggatatcattaattgataaccctttgcgcttctcttgttttactttcaaattgattgtcatttcacaccctccaataactcaggattttgataaacgtctccgattacttcaatagttgcatattccacccacccgacggcagtcacgtcataatcagcggaaatttttgatacatctacttggaaaacgccatctgaaaacttaacttcgcaaacatctgatgattctttatcatcactcgttatttttactatagacctatcataaataaatttgcctcttacctttgctccccacatgagagccgcgtttctattcgtgctgtctacaaccggaaccaaaacatctgtgtataaacgtttcaaagtccaatcgccgttgcttttgatgataaggctcaaaccttcatcatcccaataatgcatctgctcgccgtcccaaactctgtatgctgtgttcattcaactggatcctcctcatccgtatttatgattgctccaattagcttagttaaatgaataacttgatctttatttacagctgtgattgcaccatacggatgctctatgaaacatacttcattattttcattggtatataaagtacaattacatgtagtacacacataattttcgttaatcgtttggtctgctaaattaattaaagacccttcatcatgatccagcacttcaattttcttaccttcttcataatcactgatttcaagttttaactcaccgaaaaacactaatggtttaagacagagcttcaattcatctaatgataattccaagtgatatccccctccaattcgaatctcgatgaaacttacattttatccactaattttaattttgttaccttagtgaaaattacacaattcaatatgtacttacttctttgcccttactttcttcttctcttaacatatcttcagctatatacatcccctcgtaagcataatcaattattgaatgaaattctccgatgactcttcgtaaattttcctcttctttgtatgcttttaatcgcagaatcgttttcattaatttatcgagcttttcatcaagcaacatagctctctttaccatctcctatatacatattatttgtatttgaataaactataacccatcatttaatatctgtcaattagattcggccaatttatgtgaccgaatctaattttaatctgagaacataaagatcaattcattgatgtcatccctaagcttaacgaggctttgtggtgtaactgaaattgtaatatctaatttctctcccttgaaacaaagtaggaattgataatgttctgaagtcagcaatttttttgtaagtttcagactaacctctttgtaattatcttgatcaacaaatatattcaaaacaataccttcattctcctcttgctgctgattacattatgtttaatggagtctttcttttttttatttttactcaggcaattcttctgtatttgttatttcatattccatatcacttaatttaaaattttcaactgatccgtcagcttttaaaaacgagacttctttagataaaagtaaattttcacaaatcctggttactaatgtttcagagacttctggactatctgctttgtttttgagtacaatctccagattcagtgcaatattgtttaaataacctgccatcctcattctcctatgttcaattttctgtgataaacccttaaggtgttaagggaacgtgcgttctgttttgtataatcattatacatagaaagtaggtgttatgctagtggttatttatcggcttcgtatggtatgatatgtattatgtctttccataacagaacgcaggaggatgtccgattatgattaaagttgagatcgggcaatgcttgatacctgaattatgtagaaagaaagacattacaatcaatgaactttcagagataactgggattaagaaacagcagctgagcgactataatcgattagttaaagtagatatgtctattcgaactgcaaaaagaattgctgctgctttagattgtaatgtcgaagacctctatgaattcaaggttgaaaggcattgaaacgactaagactttggtcttggtctcctccttagtaaaccatatggtttacatgaccatcttactacatttaaacatgtatttaaagtgattattttgtctatttttgtcgaaatgcgaattttttcacaattttttgagataaaagaaaaatccatttaaccaaaatagtcaaatggatttcatatttaaatggtcgtctcttttagacctagttcttctgcgtaatatttattaacttcttcctcattaatataatcttgcattgaataaactgctcgatatttggattttacccttaaattaaagtcatctataatctgataccttacagagttatcaataacccctttttctttataaagctgatatgctctatacaaatgaccagatctaacaatagtatttggtgttaaaaagttaattttaaagaactcagatatatcagtaattagattagttatgacaaatttacttgcttggccgtctcctttgttggacgttctttttgttttaactacataatcattttcaactaaaaagacttcttttgtttggccttttgccttcccattctttaatttatatttagtttcctgagctgcatttaaggcaataacaagacattcactactaacttttagttttcgttcaccgtgctttgaatcatagagggttaaaacgttaccgttaagcattgcatcctcaacttgcttcttcgttaaacttagcaattcagaatgagctaaaccagaaactccttcaaaaagtagtcttaacacagccttagattgataattaactaattgattttccatttcctctaattcactataagtaatatataattttttgtccccgagacattcataaagctcttcttcagaaatagttcttgctaaattggttaatcctttacttaacttatatgaaattgcccaatcaatatacaatgacaataatgctaaggttcttcgaacactaccgatagtggtttgatcgaatgatcgtataagttctaaaatttgcattgatgtgaaatcataaatgtctttattatataaagtctcagtaatctctgcttttgcaaaaataggcctcatctgcataaccataccctcagataaggtatctaaatatttttccttaatctcactattgaacattgcaacaaacaactcctaagtaattactcgtctatttttaaattattgaagaaattccatatcttttgtggtgatttagcatttccattcttgtctactacacctaattcatcccacaacttatttttcttactaaaatctatagagcctaaaacatcagtaatcttactttccaactcgtctaggcttaccccatctaattgcaatttcttagctaatcccacataaccattaaagaacaaatagttgtttacaaaacttctcttccgttcttttgctatatcacctaagaactcatctacatattgtgtagctaaagcatcaaagaaagatgtaaggtatcttgcagtttttaagatgtctgcttgagtagaaaaatcttttttagaatagcttctttcaattgcctttttgaagtcagaaaaagttataagtaagttttgattctgatttatccagtctccatttgtctttatataatcaccaattatgctattgtcctgaataaacttaacaattttatttgaataaacattttgactcatctcagccactttagattttttaactgggtttattgtgttttgttgcccaaaatgctctctcgcccttttttgagtgtagttatagatgtccactttaaaggtttcttcaaacaaatgatctaactcaggatgttgtcttatagccatagtaatgcctattagccggtgatacccgtctaaaacgtctaaaatggtgtcttcagtcactgtaagagacatagtgtcgtcatcatattttaattcttcgccacaacttgcgcttccaacacgtgcattaaacgtaaaaactgatttaattaatttcccatctaagaacagttcctttatttcttcaaccgattgtttattgagctgcggtacaggtatctcaatatctgagccctctagttttttcgttttgttcgttctttgagcattaggattatagtgcaataacttattttcaaatagcataaacaactctttagcagtgatggggaagaaataattatcatccgaatactttacaacttgtttgaatgtatacggaaattttatatcttcctccacagatccttcccataacgtttcaatttctctcatatccgtttctgtgaagtaatttcgtggattaaacctttcactttcaagaactgagtatagggacttggctaaaaagtacatatattctttagaaatttcgacttctggattttctatatcataaattaatttttgtgttgtccctggagtaattttatttttagccatctctaattgaatatcgttaataaaagatcttatgtgtttatttttcgagatagcatctttcatttctgaaagcagtttctcatttgcagactgatcaaagatcactgtcatatagcctttcacctcatgtcatgttgctaaatttaaagttaccaaaggcaatctggttaatcaagaagaattatcatttgaactgagtaatataccgaaaaaatgattatcgctcatttacatgctttataaacttttttaatgtaacaagatcagcgttttcaaaaaaactaataaaatcctcttgggttgcttcatatagtggatttaaatcgattttttcatccattgttacaccagcagagttcgctatgttaatctttctgctcatatatctctctgttgttaatgtgtttttatgatttccttgttcttttgctgcaagtaaatcgtgaccagaattctcatagacatagtcaattcctacacccttaaatgagtgtaagactaattctctttcaggaggtattcctaacctttttttcgacctttttaaggagtgtcgtaaagattgttccgaaagcccctgaaaaaccaattcagtttcgctgtcatcctcttccttcagctgcaacaattcctcataaaatacctggttaatgcctgtagacacaacctgagatcctttatcaataactgttactatataatggcctgtactttcatcaagctgtatgtctttccatcttactcgcaaaatcgcacttacacgaaaagaagttctgatggcgaatttaacaaacagctttttcattaaaggtttctgtctttcatttatatacatatcctgagcgattctttcggcttctgtctgggttgttttatcccagtttttagttactgttttaagcctttcgacagtattaaacaccgacaagtcaatatagtccttataatcatgctccaaatatgtatagagcatcttcaaggaggtcatttttctgttaatactattattaactaatcccttttcctgaagatacttcacatagttgcttaattcgcttttacttacaactaaatcatcgggaactaaacttttgacatctttacctttaatcacactaaagaactgcttaatatccccttcataattctttctggtgttcgacacccttctagttgatgaaggcatcatatagttagaattccctgagctacttcttatatctttattgattaaaaagccctcgatatcatcgtaaaccgcataattttttaattgtttaattttattttgcattatcttctcctcctttctcatctaataactcatcaatagagacattcaacaccagagcgataagctttatggttgtaacatctgattcatctggcatttcaatgattttgtttaatgtctgcatatcaatcattgtctccctcgacaattcctctattgtgatgccacgtttgaccattagctgttttattcgctctgacatgtcaacctcctatttttatgtatactatagactgcagtgcgtatatgttatggttgataaataaactcttcaaattcaattgcaatgtgtcgttttaaattcttcacaaaatgtattagggatctaaaatgcggattattttcaatgcttctttttaatccatctccacctaataatactctatttagatcttttaataatgctgctatctctatttttgcaccatgtagatcatcttcagtttttgcattaacaatcattttcctaatgtttagtacactctctatgtaagtttgtttagcatttaatacaaaatcggcatcaatatctttatgatttgtagacctaagttctacaacatgcatcattaatcctccttgtattcgcttagcaatttcatgtatcctttagttagttgttttcgaacattttcattcttcattatttttgacttttcaatgcttttttcatgaaaaaacaaatcatttttaactaagctttcaactttcttttggtaaatggttttatgcattgtcatactgttttttaagtaactaattgcggacataccaccaacctcctatatacatattttttatcttttgcatctatagcaattgtaatgcattacaaaagggaagtaaagatttttttaacgacaaatagcacattctacgcaatttttttgcgaatgtgctgctttgtaatgcatttcatttaattagggtgtatgtatttgaagttgatcactagatgttattaaaacctaatatttaagtgatggccttaaaactacaaaagacgcttagctcaaaagagccaaacgtcttccttttctctgtttaatttaattaaataaataataatactaataactttatgtgtcaatggattttatgctccacgtggcattccagcaacctcataatcacctgaagcttgttggattgaagaatctgcacttatgtaagaagtgcctagtgcgcccaagataactaaagccataataagttttttcattgtctcacctcctttaaagtaaaagtaattctaaaagtttttgattttcacccatcttttgcagttctaacagtggcagcctaataaggaatttgtcattagactttttaaaatactcgattgaagaatagaaacatgctttattttgttcgagtcttcctttcaaataataatgcattgcaagctcattatcgttgtgaactaaaagatctagtttatccaaaacttcttttgctttggaattttcattaaagttgataaaacaatgagcttgctcctgcaaatccataattgaatcagattcaaaattaatccacttattttctttgcgccatacattatttaagaagcacaaagcctgctggaaaatcatgttgtaattttcattttgaacagaaatgcttagcccttttaaaaagttttcttgagccaattcataattcgaaaataatagagagttgccaatagttaagtagctgaaaacctgaaatctcaggatatttgtactttccaatgcctttttagagtactctctgcactcctctaatgaattttcatttaactttatattagacattagaacatgaactcttgtttgatatgtatttctaatgtacatgttctcagaaatctcacttaggtcaatttgttttataagttgggccatcggagaaaagttaccagtgcttaaataatgataaagcagcaagagtcttgagaaagaattcatttcaggtgtttttatatttaatttgccgagtcttttcactgcctcaaattcagtaataacactgttagacagttctctatgtattttatacacttttccatattctttacttttcatattgctgcaagaaatcattgaatctattaaaacatcttctatttcaaaaaacatatttgcatcagcatactccaatgcacttcttgctgcctttgtcttaacatctaggtttaaacagtaatctttcattaattcatattcacggtctggatactgactcttaacaatgttgactattgaagaaaattcattaaatgttttcccatcatggtttaagaagtcataaagaggattggggtttttaaggccagctactgttgcccatttattcattaaagagttgtcattttccaagtctttcttcatagctatccttattaactccattatttcccctcatttctttttgttgtctttattggttaacttaataatactatagatcacattacgagtcaattattttatacatattttttgtatttgtaatctctttaaaattccaattttaactagacacaatgaggactaaacctcattgtgttcttctaaagcaaaaggtcctacttaaggctataatacacctcttccgcaatatcctttgcaaacctagcgaaaatttctctatcaaaacttcttaagcatttagctaaggacaggatattctgcacatggtcaagtgtattagtcaaatctaatgccgttaccaaagaaagcaacatgtctttgtagttcatatctccggcaacgcctttataaaccacatgttgccgttcatcgaaaactggggcattctcagataggtgtatatcaaatttcgcagcgatatcctcccgctctatagatatcaactctttaattaactctactaattgctgttcactcaaattagaataacttgctctcaataaattaaaggaatcaacacctatttcaccatggaggtcttcccatctaaaatataaaaatgtgtttttcattttaaaactcccctaagaatactttgtacattttcccgttatgatcttttgcctcaagataaaccctattgcattttttcacttgtttagtttccttttcgtttaaaaattttattatattaatagcgatgatttgcttagaaggcaaattaatattaaataacttatccctgtaatagccaaactcagcaaactcttcagttgttgctttatcatcaggggtaacagaaacaattaaatttgtgtttttgtaaaagcaaaatttaatttcccgtagaaccttggggatctcagcgccattgtatatttcaatctgggagtgtatttctatttgctttgcttcatctttagatggcataacattagttccccaaccatcattatcggttttaaaatatatttcaaagtcaactatataaaatttaatttgcccaaagtgctttaatatgtgagtaagaattaaagtgactataactcccaataaagccccaatgataccttcaaaattagaaattatttctcctatattattcaaatttgaatatttcctttctgtatgtcttataagatgtgatctattgactcatgtaataaatgcttgttttttgttaaatatcccctcgcccaaggctgtatgttgtatgcaaaataagaaccacgattactaatattagaacttctataaataatctttaaatgttctaattcctgagctgtcccatcagttatacttaattccacagaccgaacatcgtcaaagatgtaggggcttaatatttgtttttccctcctattaagatttcggagtctttctttttgcagtttataactgtatttttggtcaattttattttttatccccaaacttatccaccaaataaagtgagataaaatgaaactggttgatgctaagaaaacaagccctaggtaaagtttatagctatttatagcatcttttataccaagtgtttttcctaatccaacattccctaaccaaagcccaattccagaaaaaactgctagtcccaataaatatttagggctcagcttaataatgtcacctacccatgaaggacttttttcattttggtcactcatataatcaaccacctcatatttatagaatagtgaagatgttatagccgcttccattcaacatactcgaaccgcttctgatacaagtcttcaagtatagcagcccattcaatccaaccttctgcaacaatgtttttcttttctccattctcaatccactctatccaatacacctgaacactcctaacgctttacgacttgaatttcccttacctcacattgcacattacacttcgttttaagctcacttgctacctcgatgacttctaacatattatgtattttagaagcttcatggaggtcgctagatgtcaaataaccactctcatctaatttaaatgctttaaagtattccttgttttcaaactgcagtacataaaaataatcaatcaaaggcataaatcaacctcttttaaataattttgtaatcctcattgccaatggcagtaaaccaattaacataaaaaaagcaatcacattaagcttatttttgaaaaacaggctggccaaattcctttccatgcccgctgctgtttctttatccatgagttctttaaactcttcatcatagacctgatcaacaaaaataaacttaatgccagtcaataatccaactccaagccaaataattaaaaaataagctaatccaatcatttgttccctccctatatcgaacgaaatttggtattcttgagtatgttgaataaattatgtaggtgatcttgtggaagagaaatacgaaacaaacggatatgacacttcaatcgtatatgattacaaagaatatcctgatgtaaaatacggccgctgcgacaattgtgattacactttgtttaaaagctctgtgaagagtggaatatttttacgtgaatgcagaaggtgtggcatgaaaaagagcatttagtgtaatgctctttttgtttaaaacacttcttttatcttgattctttatgctctcggattaagacgcgtaatcgtgttaaggttagcataaggagtgataccttgctaaaagttgcaaaaatttcggtttcttgcattgtattagtcttgtgcatatactcattgttcaatcaaaatgaattattgttgattgttgtgcaattatttgttgccgcccttttatcattagtcggagttgaagcgatattaagcaaacaaaaactgtccgaatatttactgtttggatcagcagccttcttacttgttgtaaacggtgtgaaattcataatttaatatgttaatttcgtaggaatatcgaatcccaaaaccaataaataaacgcagctacaatactcataatgtaatactcaaagcttctgaacatggtaagagcatttggcggataatcaacaaaccagaacaaaaacacagctgaaaaggccactgcaatataaattaaaaaattgatcaaactgaattttctgcgccttcttcttagccacacttgcaaaggggcagcaaacaccaagtaagtgattaaagcgtaaaatgcaatgatggcaattgtgactaatgctattgccataaatccagagtaaacaaacagatacagaccaaaaattagaccaaatgacaaacttgaaaacgccagagtataaacataactgtttaacgctttttgattgaggctcaaatcagcacctccgcttgtttcacatttccctttaaaatcgtagtttttagatttcagttacagttggtctttaacaactgatctatatctaattaaaaaggcctctagtctccccaactctgttttatggtaatcatgatgagtcccttcggtttctggaaataatggatttttgataggaagcgattctggtgagtccttatgactttggaacgtttcccaagctacggggtcagatatttggaatgtctcgcccaataacgaacaatgtccactgtcttttctttgcctaacaggaatagcataattcttatatagcttgtaattttcaattgtttgtctgttaatcttagaagacaaataacagattccccagtattccgaagactctgtctgtttaacccattcaagcaaaaattgaggaatgatatattctggtttaaaaatgtctttttgtttttttactctaattaggcatgcagatattaaaatccatgtcataaagtatgcattaaatttatatatttttcttctaaatgttatttcaaaaaatttctttagattatctgccagttccgtaggtgaaacacttaaatccagaatttttatatcttcatcctcaaggtgaaaaaccgaagtgtaggtagtatttaagtcaggccttcctagttcttcccaacaaacaagtgatgaacttccaaggtaaagacatggaaatcctggtatactaaaacgatttgtgcgtattattcctctcttctcaaatggtatatgaaacatatcatctttagaaaaaacctctgtgttactggttctcattctaaagaatttacaaggaatacgaatactatcaatgttatataagagcagctcttcaatgttaacctcttcagaaaagatattcattcctttatcaaattcagcatatgctaaatgcacataaccatctaagtaaagttcaattgttttagtaatttgttgcgcaaaagattctatctttgtgatttttgatgaatcgaatgattttctatttggtagcttatgcaattcttctatatattctgtataaacattctccataaaagcatctaaatcatccccacccgttctttctattggaatatcgcatttatcaataataaaacttaatattggatctatttcaatagtccattcaattaaaatgtctaacctttctttatttgaaaaggtgctggtgttaattttttcctccccaataacatcattggtgtttttgtctataaattcaggttttactgttaactctttaaaaatatcaaatgcaagctctttcaaagaatcattaatttcctcatgtttcgataattctttttttagccttttagcttttctatacaaatccatttatgttctccttattaatttttcaccttttccatataagtacgattttatgtagacctggaaaacttgtaattccttcctatgcttgtaactttagtataccattttcatcctgagtgatcgatatggttatggcttttttcgaatatcagcaattcctgcagctcgatgtttaggtatgtacagactttatctaacagatctcttggataccgctccatttcgtcattataaagctttctgacagttggatactcatgatcaatatctctagatagcttccggatactgatctttctttcgtctattatggactttaaatttgatctaatcataattccactcttttcatttgtcttttattgataccttatagtaatcaactgatacataaaaaagaccaagataagacttggtcaataatgcataaatctaagttcgttttatcgttcttattcgtgatctaaatcgaaaaccgtttaaacctttttaacttcttacaacatagatacttagtcaaaagcaaatgttttttgtatggcaactctgagaaatttttatcgccaactgactgtaaatccttataaagacatttttaattgtctcttgttttccaagggacaaattcatatactccttctattataggtacctttaaacggtttacataacttccttcatatcccaatattccaagtgttagtaattcaagataccaaacaccaagataaagtacatggagcttatctatcggattgtcaaaatcaagttcccttgtaggatggactatcttattcctaaatacagtaaaaaggtgtgggccatcgtcataattatccttaatgtcaataaagagttttggtattgataagtcaattgaaaatctagataatatttctctaaatttctctgctgcattcatatacttatatttcgatttactaatattggattttctgtctacaataagatacacccacgccaaagtttccaatgcaacctgaacagataccaccttgttttctactatacttgatgaatgtgcttgggagtaccaactcaacacttcccataaaactttattccaaaaaggatcttcttgcttctcaatcacctttggaaataaatgttctaaggatggagatttttgttttggaaaccaagtaatattattagtccagccatctattaatggaacttggtatttactccatattacctcctcgttgtggtatccttccaatgtagggatagcaacatgtctacctgctgaaaaggataataaccaataaagccctgaaataagtggttctacttctttagtatcaaataatttatcatccactctttttaaatatcccacatgtgttattaagtatccacccgaattttttaatctatcaaagatttttttgtttgaatagtcatatcgcttatccaaaattatttcccaatctttatattttaattttgttctccctgaaaatttaaaccttccatgcacaatccttctacctaaatcattcacgaagttaaccaccgtgaattccattctattcactttagtttcagctgaggttaaaatagatcgttttagtatccctgatactttgttccctttacttccgtctgttatacctgaaataagaacttcagatttcataaatccaggtacattaatcatcatattattacttttcattgccttttcaaattcgaaaagcttgctaagattgcctgaaatggctccttcaaatattagtctagcttttggtaaaaatgcaattttaacttctcccaagatttcaaaaaaatcatcagcaacttcaattgtaaagtggccggtatagattttaatcggttcattaatatcgtactctaaaaaggaggattcaagagctatattttccaaatttatcacctaattattttctcaaattttaaagtctattatttaagttcttcattacttttgcaattccttcactaaggaggtcattccccatagagttccaaacctgcttcttttcttttaattctctgtccctaattctatgcgattatttaatgaacctgtcttcttgaagatcaatcatgaccatctccaattttgttctgtacagctttcactatccatattctatttaaaatatgcattttattttgatatatatctgaagctaaacattctttattcaagaaaagaatcgctgctttgaactattgtgactcatttaaaacggtataatcacttgttaaagctaattcctatccttcccaggtaataatataattgagtggttctaaccccttttctaaacaaagaaccgtgtactcaaattctaaatcaaggatttctccttcccatgcctcatcgaaattccctgaccctctttcttttcgatcaatgaaatagtccctcttcatctcaatgatttgtttttcaagatcttcaaatcccgtagaataatcttgatcagtattatgaatttcttcatcaattttatcgagtgcagcgtaaacttcttcgtcagacatgcaatcaacttgtgaatgcgtgtatcccagattaagcaggtcatttcggcagttatttgaaatgcttccttgtaatctatttgtaagactagactcaaatttttcaagctgtgattccagctcaatacgattggatttaagagcatcaagattagtatctaactcacagtattgtgtattaatttcattttccaattcatcaagtctagactccagattaaaaagttgcgcattcattttaactacctcctgtttttatacatattatttgtatttgttatttatattataacttgataatctataataatcaataattaaatacatattttttgtatttgatatagcgttaatattaattgctcatgagggggtttgggggtggtgtgagcaaaaattgttcaggtgaggaacgaaccgttttgaacaattagcagcacccccattctcttattttattatttaatttatttacttcttttcttctacgagagacccctataaaacccttatgtaccaagggtttcaaaaacgatttattgctttttttttcatacgctattcttatctctggttctctaaccaatccattaacagctttctcattcgtgatgatgggacatatatattaatatcctgtccatttcttatagctgatctccaaatccattgaatcatctcagataaagcaaaattgtcctcgtttatgattattcccttggatctaaaataatcatcaattgcaggattaacgaatctgtttattgaataaaccaaagatcttttgtgactgtattcgttcgttgctttgatgttacaggctaaaaagcctttcgtataacctttcccacttagtttacttttatgtgatttaaaagttgtccaaagattacccttagactttgatttaagtatattctggtagtaattcagaatattattcttaagccgtttatgtaacactgaacgtttttcaaaccagttttttgataatgcataataatcatcaccaattttattcaagtcaccttcatatattttaattttatgtcttaggacatccttctttgctttatcaaattgcctactgtgctgcattaatttataactgtcattgtctttgactactgcataaagttcatattctattccgttaatgtcataataatatttctgaatctgagcatcaaacaaatatgtaagattatagacctgtttaaattgggcaaagatgtctgcaggaaactgccaaaacaatacagactcattatgcaaaattaagtttttactcttggccaaatgtttaagtgtttggaactctcctttatattccctattaagatttctttcttgttcatcattccaaatgattgtgccattattgttcttaatccattcattttggaacagcatatccagatcatccttggatatatttaatttcttaaccacttccatagtttcatccaggataagagtataattgcctgagtaaatcaattctttagttgtttcattagccatactgaataaagcatgagttgttacaatgtcattgttatctgctaaatgtttatgtaatgaatccagtttatagagcgtttccccttcctcactatgtatttttggttcgtaaaactttctattcgtacatgacctctttattcttgttacctcatcaagatatggtgtgataaagataaaatgctcattctttggtgcctcattcatcatcttaataatgtaagttgttttaccagatcccataatagaatcgataactttaactctttccatatatcctccttatattttaattttgtatcgaaaaataaggaacgataattgccttaccgctcccttatttataacgcatatttaattatccttgtgttgctgcatgattaatactgaatcatcttgttttactttgcttatctcttctctgtactctaaaaggtctttatcaattctgacagttgcttctttgatggagtcaatatctttcttgagcatttccaattcctttgttagctgctgaatagcatccaggaattttttctccaatcatctcacctcaatgatttaattataccatgaggcctatatgattagtgtgacttgtttcttagtttaaggaatacacaatagatgatccataacaatatggcaatgatacatgtgacaacaaaaattgtgttgattagcgcctgtccttcgctgctgaagtaatctttgatgagttgaaacattaagaataagccaatgaatgtgatatgggtaaaccataatgagaatcgtttcatgtttgcaatgtgcttgatcatgttataatatgggtaggaactaaaggagaagttcattcccctttagcttagctctcatcggcgtatacgttggcgttgtctctttggtcggagccgcttgcgtatacgctttttctttttgcttgtcccattctttaggtttcttaccttctcaactattgttagactgttgattgtaagaaccgttaaagatatgaggaaagcaactacgatacccattttctcaagcactatgtacacctcctttcctatgactctattataacataattcatgatttttatatacatattttttatatttgtggtaagttatttgtgtgttgatggatggtattaagatgccttgtgtgctgtttgaatgaacaagaatacaattggattgggaattgattaaggatgcttagagaggtgttatattggctctgagagcgtgttaatgtatgagtgtgattaggtggaatgtatgatgggatccggtgtaaatttttcgtcttctttcctcaagaagtgaaatatgatacaaggtaaagcctcctaccaacaaaataaaaacttatgttcgactttattttctaaagaaaagccccaaaatagggcttgtttttaatgctctaagttaatttttaagtctagcttgtcccctaaattctttaagtcctcattaaatggagaagagattctcagccgaattgattctaaatcttttatatcctcttcgttatcaaaaacatatatgatggatccactatcatttacttttcctacgtactcgtcgagaagcctgtcactttccaacaatgatggctcatcgatttgtaccccagtgcttgttgctaattgtgctagacttggtctgaaacgaactacttcatcagatgtattttctgattcaatttgaacatcaataaaaggtagttgttcgttggcaacagcggcaattactttttttacagtaaattggatcgggccagttttcacagtggtttctttattgctgatggccattactttagctgtaccaccatcaatttcataaacatccccaactttttcaggaccattaactgagatgtcttggctttctgatgtgttggtatcagttgcattgtttgtgtcttctgatgatgaagaagactcttcactatttttgcaagctgcgagcaatatcagtgaagtgattaatagtaaaatccccaattttttaaacaatttcatttcccctttttactccagttattttttcttttctttcatttaacttaatggtgttaaacagtttgttttctttttattaaacaaatgttttaccagaagaattaagaatagctactaatgttcttcgaactctttttttaaaagataatacagtaactctttagcttgctcttccgagatcattccattatatccagcaattaaagtctctggatcatttaatatctcatcgagatcaaattgtgcatgtgtgccttttagaagaaagtcagtagatactcctaatatattgcttaatttagtaagggtttttaaatcaggttcagccttaccaatttcatatttcccatatccctgtctcgtaattcctaagaaatccgccatccgttgctggctatatcctttggaggtacggcatttttttaaacgttctccaaacatagtaggttcctcactttgacaattattatataagcaaatagtttcgtaaacaaaaagaagcaaaaagtttcataaaatatatcgggagaaactaaaggtttctttaattgttaacagtgtagaaacaaactgtttacagaaggagatgttgatttgaaaaagagaaccttagttaaagacaagttgctgactacctttcaaggctgagatggtcagtaaatacaagggttatatatgaagatatgatatagtaatgtaagtggataagaataaattatgtcttcgattccctcggattcgttataaatacgattatttttaatgaatggttattcatttttaaattgaaaaacaatttattttttaaaaattaattcttgtgtttgacctggaattatgatagcattggtgcagacctgcccaagtcattaaatgcacgtataatgttccttatacacgcattacaataccaatatatgggggtatatttacatctaatggtaaaattaagggaacagatgtacccatagcacttccatttccacaccctatccaaattttcattttcctaattccacctcaaaatcaccctttttcacatcgtaatcgctatcgtaaaagccttaaatatcaacattttcccctcttcaaatttactcgatttcttcaatatttagataaagcaaccactttcccctactctcacttatgttttacgatcgtttatcccctaatcaccattcgatacagcaaatctccttatgtttactggctttttaaactctttaatattttttacgataagcatgtttttagattacgataatccccccttctctaaatgcttcagaattcacctcttaacctggagctattaacacactagcgaaaaaacaatagacaaatacaaataatatgtatataataaatccataagtgaggaggtgagataatgcaaaaggattcagagaaagtaacgtacatgtttagtaatttaattggatttttagagactgctattattgaaggaactgcttcacaagaagaaaacactctttatgaggactataaactatttggaacaatcgataaaaagagctatacatataaaaatcttgtacataagtatctaaaaagcgattattaaatcaaaaaatatgcataaaagtaataaggggagaatttattgaaaggaaaaaaagacggcctaaataaacaagtacatatttacagtattgacacttctgctttttataatgatcaagaaaacaaattacataacaagattttaaaatcatataggtacagagatcatctcagaaaacttgaacatgttgataaaaaacataagaagtacataacgcaaaggattatttccttaaaagaaaagctttataacgcctttaacgatcataatcaaataagaacacttagaacagattctctgaaagataataatgtgatttcattatttgattcagtcttaactcgaacgctgggaatcaaagaaaactctctctctgaagagatcatggttgtccaaacttatcactttcaaattttaagggacattattgataaaggattcatacataacaatgagaaatacgtttatttcactagcagtgccggtcaaataagaacaaaaaaatcttgttttatcaaacaaagcaccttagataagtatcaaaatgctttaacttgtggtcttagtgtggagcatatcaatgctcaaggtggaagcagcataaacaaatggaatagctacatggccttatcgaatagcgccagcagttcatgggaaattgatattgataaagcaattgtcgtaaatgacttagaaacaaatgtttccagcctagttgattatattgaccgggatacatatgaaatcacacgtaagattatggatattcctatagaacatacagatggttgtggaatgatgctccctagtttgagtcagaaaagctttatggtcagattaccttgggttaagggtctacttgttccatttgactttagaaagtttgctgaaaaacacagttcatttatagttaaagacgtctacggtaaagaatgggacattattaaagatgatatccaaataatttttacgaaaagccagtttaagatgtggaagtactatgattcttgggatgattatcgctataaatttaaaaagtatggatgtttaggagctaaattaaatgaagaagatccatctgttgagggaaaactgacttaccagatgctacaaacactcacggatatcacagatgaggaattgaaacaaatcagctcaaagactgttagtgagattactcaattaggcactgataaagaaacaatgatgaaagttttaggggctaccgagaaaaataaacataagacaagccttcaagaagctctactaatatatcctgagctgctaaatgatgatcacaccaaagaaatcattaagaataagaagaagagtatgattaaggacgccaaatcaggaaaattacttgtcagtgacgcccggtatacatatttatgtcctgacctatatgctttttgtgaaagattgtttcttggaattgagagtccaaaaggactactttcaggaagcgatgtccattgttctttatatgatgaagggtatattgatatcctccgctcccctcacctattcagagagcatggtgttaggtggaacaagaaaaatgaggaatatgaaaagtggttcattaccccaggtgtttataccagcattcatgatccgatatccaagctgctgcagtttgacaatgacggggataaggccttaattatttctgatgagctaatcgtcaatattgccaagcgtaatatggcggacatcgttcctttgtattatgaaatgtctgtagcccagaaacaagagattaatagcagaaacatctatgaagcactaactcttgcttatggaatcaatatcggggagtacagtaacaacatcactaagatatggaacagtgacaatataaacctggacgtgatcaaatggttatgcatggagaataactttactatcgattttgcaaaaaccttattcatgcccacccgccctgatcacgttgatgagaaaatcaaagattacataaaaaataaagtgccccacttcttcatcaatgcaaaggataaagaagaacatagcgtagaatcgattaatgaaagtacagtaaataagttagactccattatcccttctgaccgaatcaactttgctgcagttgcaggaaaatttgattaccgcttcttactcaaaaacaaagagattaaacttaatgaagccgtaataaatgaatataaacgtcttgatcgaaataaaaaatggcttatgaatgatgaagaagctaaaccaggacaaaaactttatgtctataagattatcaaacaaaaactattggaaatacataatgatgacggatttattacagatgtattggtaaaacatctatataagaaaaaaagtaaatacaaatcgacactgtgggagtgctttggcgatattgtactggagaacattaagcataatttaaagacctttaaaggatgctgtatttgtggaaaagcttttaagccaacatctaacaaagcgaagtactgtcagtcttgtggaaagaaaaaagaacgtgacaaatacaaaaaatataacaaaaagagaattaaccaccgttagaaagtgccttgagccttactcccccaaggtgtacagcgattttaccgaaaaaaacttcaacaaaaaagtgtctttatcccttggtgctactgggttgagagcacttttggagataatcgtcataagggagacagaaagctaatttccacataaaagggctagtacgtttcccccgtctatataaaagacaatctttattgttcatttagaataaatttaataatacttaggaggaaattgattatgaataaaacagaactaatcgctaaagtggcagaaaaacaaggggtatctaaaaaagaaggagctcccagtgtcgaaaaagtctttgacactatttcagaggcattaaaaagtggagaaaaagtaagtattcctggtttcggaacatttgaagttcgtgaacgcgcagctcgtaaagggagaaatccccagacaggagaggaaattgatattccggctacaaaagcacctgcatttaagccagcaaaagcacttaaagacgcagtcaaagctaaataatcagttaatgaggacgacaggaaaggctacctgcacgctttgtcacaaagagcttatgctcctaaaagtggcagagttggaagttatggaggaaattgtcgacctcccctcttttcgcttttcatcttcaactccgggttaattaattatagttatttatttatggcatgggggtgccgtcaataattagttgattactgatatttgggatatcagttctcgactaatgttcatttatgaaggtaaagactaatctaaatgaatattagtggagattcctctccagtgtgaactagcttttctcgattaaacaatatctactcccttcttttctgtatcattctgacacaaaactgcggctggtcattgcagttagtcggataatagtcatttatgagggtgcgaggttaactcggatgtctgtatcttcaggagacagataaatggctattatcgggctaaacatgtcggtaagacctttgctactcaagttttttatgtagggtgaatcccatcacagtcttactatgggtgacatgtatccctgaatattaattgcggtgtactgcttcggcttacacttagggaatgtagatgcgtctcccttccctttaaataatgcccttgtaagcttcgatgcttattatgcggtcaacaaaatttttccgggtaaacgaggctttgaaattacataccctcgtaaaataagtgatatggttttgggcgcttgatcaccgctgtcatttcacagaaaaggattattttcggtcttgccttttcctttcacttagtaacatattcgctacttttccttcaagaaacttacctttcccatgcacatacctccttacacgggtcagagaaaactgtgcaaaataaatggcgagagtttgagacgctttgtttctcaataaggcgtgtaacctgacaagagagactgaaaacgccattgagaaggcttataatgggtctttccttctcattattggtgtttcgccaccataatgtgtcgaggtttagagttagtatttcattgtctgatcgagagtagccgattaatcccgcgtgggggacactaaagataccgcgatacgtccagctttgggattccttccattgccgctactaatcaaggcttcactgtgaattcagagattttacacagttcttaaatgaattagctcatctgccatgtgcagaaggagaatcagttttcgcacagcgattaccggtttatatgctcatgtaccatgatgtacaaggagttcctgaagacgttattttggcgtcttttgatatttcgacttacttatagtttgtcaactgcaaaggtttcagtcgctgaacccgtaatcagcgtaatccctgtcgatctgaaggcttgcgtcccaacgtgagctaatgacgtaggtgaaacggggttagaatgtaatcagaacaaggtcatctaaatcgttagaaggcctttttgtgcttgcgttttactgatcagccggaatgtgtttacgagccttccggtacgcaagttatcaataatctccttcgggcgtttccccaacgcctatccgacttatctttcatctcctttatatccccttctcggacgttaccgatgcttcggatcatcgggcttccgaaggagcttattgtacgtaaatagaaaattattggaggaatttaaatggcaagcaaaaaagtacatcaaattaatgttaaaggcttttttgatatggacgtaatggaagttactgaacaaactaaagaagctgaatacacatatgatttcaaagaaattctttcagagtttaatggaaaaaatgtttcaattactgtaaaagaagaaaatgaacttcctgttaaaggcgttgagtaaggagatgactgactgaatgatcgatcctgttcaaactaagcgtcactcagatgaaaaccttaaagaatggaaaataagaatctgctctaataaagacatttataatctaaactgggaagaaatcaaagagttaatcaacaaggaaactggtgaatctaaaggtgaatcagcttatagaaaatggttcaacaacttcattgaaggagttgaataccaacgagaaaggtcagatgaatcaaataattctctccttgaattggaactgaaaaaggttgaaatcatggaagagagaaaaaagcttcaagctgtaaagcatgaaatacataaaaacacacgcgtcaaaggccgaacagagctgctatatgaaaatgtaactgaagcaattgagaaagtaggtactctccctcccccttccttctatccattaaataagaacgaaagaaaaagagctgctgttctagggtttggagatgaacacttcgggaagcaatttaaaagcaacaacaatgaatacaacgaacagatttatttgcagcgtatgaatcagattctttctgaaactgttgagtacattcaaaaagaaaatttagatgagctggtcgtgttaaatggtgctgacagtgttgaaggtatggcattgcgcgtatcgcaattaactgcccttcagtacgggtttattgaccaagtgataaaatactctaggtacaaagctgaatggcttttagaactttctaagcacgtcaaaattaagtacatacatatcccttctgcaaatcatactgaactaagattacataatacaaatcgctcggaaatgcctaaagaagatgtagagcgtattatagctacttatatccatgacgtactcaaagacaatgagcgaattgaagttcctttatacgacgaaggaattgtggattttaaattacttgaatttgaaattgtcgcatgtcacggacaccagattaaaaacaaaaagaatgccattcgtgacatctcacagatgaaacgaaaattctacgattacatgtacatctcccacttccaccacggaaacatgctcactgtaggtgaagcagccactcataatatccaagttatacaactcccttctgtaatgggttccgatgaatacagtgacagcttaatgacaggtgccaaagctggagcaaacctttcaatttatgagtccggtaaaggtcggattattcaatacgattacatattaaattaaagaaggctcctattaggccttctttaattaggtttatcttgtaaatccctctaagtctttaacgtgagtagatacatcttttataaagtcaattgtttcaggcgaatcattcaagtaatcaactgtcaataattccttttctttaatctcactgatgagatttctaataacattttgaagctcagtttttttatctgtaatgaaataatacttaactcgattaccctcacgtgaaattcctaatcgatcaactggctgtgtagataatttatttaatacacctcgaagaactccatttctatattcaccattcttaacaagttcaggtatcttttttgctagttcttcaagcagctctttttctgtaagagggtgttttgaaccctttaaaatcactggtatatttttacgtacaagatctgataatgtaactttgttttccataacgtgatctcccctttagatatcgtaatacataaatagtgtaatccacttttttatcagatgtcaacatccaatagtggatttttaaacctaaagttaaactattaatctttttttgataaaactttaattttatttagattggagtcgcattaatggttgactgcaaaaaggtttattaaagtaatacaaaaaaacgattgaggatgaagaagaaaatgacgaatgaagactttaaatatctgaataagcacttagaaacacttgcccaactcaagcagtctggatacaaatgtgataaagagatatctactgttattagtaaattacataaactaatgggacttgcatcaaaatcaaaagttaatttttacactttaggtagcaatgttgaaaacgaaaacattgctgattataaaataggcgtagattctccaaaaggaaataggttgttaatcgttgatccccggacagattgtacaacagttttacttgttaatgttaaagactccaaatttgaaaatattaaaagaagaatagcttctcagacattcggatatcaagcagacctattggttcagattttaaaagaaaaacgccctgacaaactgttgattgatacatgtggaattggtaaagggttaatggacatggtgattgaaaagttaaaaacacaagatatcgaaatgtctcccagtggtgatttgacctatagttaagcacctttttagaacgcccagcgaagattgcggtactccccttccgctctattgctgggcgtttcgtaaaatgtgtttacataaactttatggaggtgaaatatgtctgctgaaaaaataaaatgctcatgctgcggcaaagaacaaaatgccaatcaatattatatatcggaatctcctttcaattctgcaacaggcaaactgtcagtatgtaagagctgtctccaaaatgaattccaaaaagacaaagataacttaaagaatgttcaaaacatcttaagaatgattgaccgtccttttgtttacgacttgtgggtttccgctgttaatgaatcagagtccaagaaaaaatcagctggaaatgtgttaggtacttatatgaaaaatatcggaatgaaagattacaagtcaaaaacttgggcagacagtgagtttgactttgaagaagaacaagaatatacaacacaattgttactagctaaaagtacagaagatatatctaaggaagacatagatgaattaatgcaattctggggtcgtggtcttgatgttgaagattatatttggcttcagaatgagtacattgacttcacgaataggtatgaatgcgactctaagggaatggaacttcttataaatgaaatatgtttgactcggctagatatacgcaaacggcgtgaaaatggtgaaaaagtcgatcagcagcaaaaaactcttcaagatttacttgggtcaagtaatttaaaacccgttcaagaaactggagcaagtggagttgaacaagagtcttttggcactctgatcaaaaaatatgagaatgagagacctattcctgagccagagcctagatggaaagatcctgataaaatcgggaaatacattaaggtatttttccttgggcatctgtctcgaatgcttggtttgaaaaatcaatattcagaggaatattgggaagaaatgaataagcatactgttgaagaacctgttgcagaagaagaggatcgagaaaatgacctcacataaaaattttacaacagatcgcaacaagcacagtcgaggaatcaatatttttaaaaagggaaacaactttaaaaagaaatcaaaatctgaaagattaatggatggtatcggcgcatggacttctttctatagagcaaacccacatcgttttgtaaaagaatacttgggtattacacttaaattgtttcaatgtattttaatttacatgatggtacataaccattattttatgtacctggccagtcgtgggcagggtaaaacttggctaacctctgtatactgctgtgtgcaagccatactcttcccaggtactaaaatagttatcgcatcgggcacaaagggacaagctcgtgaagtcatagagaaaattgatgacttacgcaaagaatcacctaatttaaggcgagaaattgaagatttaaaaacctcaacaaatgatgctaaagtggagtttcataatggcagctggattaaaatcgtagcctcaaatgatggcgcccgctccaagcgtgcaaacctccttattgtagatgaattcagaatggttgattttgaaatcatcagtaaagtacttcgaaaattcctgacagctccccgttctcctaaatatctcgaaaaagaagaatacgctcacttaaaagaacgaaacaaagaaatttacttgtcttcctgctggtacaaggttcattggtcatttaacagattcataacttactacaatgccatgatgaaaggatcaaaatattttgtgtgtggtctcccttatcagatcgcaattaaagaaggtcttttggataaagatcaggttagagatgaaatggccgaagaagactttgatcctatcggttggtctatggaaatggaagctctctggtttggtgaatctgaaaaagcctattttaaattcgaagacattgaaaagaaccgcaagcttgcttctcccctcttccctcctgactattacagtctaatcaaggattccaacttcaaatatgaaggcaagaaaccaggagaaattagactggtaagcaatgatatcgctggaatggccggtaaggataatgatgccagtgtttacactgtattcagactgattccaaactccaatggatatgatcgtcatattgtatacatggagagcatcgtaggtggtcacacaggaactcaagcaacaagaattagacaaatatacgaagattatgattgcgattatattgtattagatactcaaagtatcggacttggtgtgtatgatgcattatgccagcctttatatgataaagaacgtgcaaaagaatatgagccattttcatgtattaacgatgaaagaatggctgcgcgttgtacttatcaaaatgctgaaaaagtaatttatagcattaaaggtaatgcacaattgaacagcgaaattgcggtattactaaaagatggattcaaacgaggaaaaatcaaaattcctatcaacgaaaatgaaggaaaagaatacctgaaaagatttaaaggctatgaagggctatctcctgaagttaaaggaaaattcctttcaagctatgctcagattacccttctaataaatgaaatgatcaacttagaagctgaatatagcgataacggacaagttaagcttaaagagccaaagagtaaacgaaaagacagatatagctcagtggcttatggcaactatattgctactgtattagaaagacagttaaacaaacaaactgaatatgacgttgaagatgaattagtctatttttaaaagaaatgaggtgaaacatggtaaccttaaataaagttgacattgagtctgaagagtataagcaaatgctgaatgactattcaacttatacttctacatttgcttccggctttatctcaaatatgttttccaatggcattgttacggaaattgaggccgaacaattaaagaattacttttctaaccccgatgaatttcaagaagaaattgaagatcttgctcagtatttttacatttcgactgctgagattcaccaattgtttgaattgattgaagccctccctaccctcaactataaaattgactcctttaataaagttaagtcttcagataagcatatttcccttttgaataaatccttacataaggttaagcacaaaagacttactagggatctgttaaaacaggtagctacagctggtactcttgttggtatatggcttggggatgctaagagcccgtatccgtttatttttgatgaaattaaatatgtattcccctcctttagaagaaacggagactgggtatgtgtagttgacatggagctgttcactaagtataaagatgatcaaagaaacgaattgttaaaaagcctctccccttatattaaacaaagcgattatgaaaacttcatgaaagatcgagagaaatatcggtttaaggaattgccacaagaaagaacttttccactacgcacagggacgctaaaaagaaatcaaggattgggaacatcttgggttacaccaggtctatatgacgttctccataaaaagaaacttaaagatgttgaaagatcgattgcaaataaaattattaacgctgttgcagttctaacgattggaacagataaaggtaatggcgaatacacaaacatgaagctgcctaaagcagttaaacaaaaaattcatggtggcgttaaaacggctttggaaaaaaaccaaaaagatggagtgactgtagtatcaatccctgactttgctgatatcaattttccagatgttaaagcagatggattagatggagcaaaatttgatcatatcaatagcgacattcaatctgcttacggattatccggctctcttttaaatggtgatggcggtaactacgcaacttcgtcattaaacttggatacattttataagcgtattggcgttttaatggaggatattgaacaagaggtttatcaaaagttattcaaccttgttttgcctgctgcccaaaaagacaattactatatgaattacgataaagacaagccgctcactcttaaagaaaaaatggacatcttaattaaattaaacgataagggctggtctattaagcacgtagttgacaatttggcaggagtgtcttgggaaagttaccttgaacaaactctatatgaaactgaagagctgaaactccaagaaaaaattagaccttatcaaacttcatataccttcactgggaatgaagttggccgcccaaatgaaggtaataaaaacaacgacaacacagtgaagtcagctacatccaacggtaatgacaatcctatttaaaacttcacttttgaagggaggtgaaattatttgacaaagaagcaaaagaaaaaactatgccaacttcaattgaatgagattaaaacatcagatgacccaacaaagttgtcatgtagctttgtcatttttgatttcgatgtctctcacaataatacagtaatttctaaggatgttgctcttgaagctgcttcaacaattattaataaaccgattgttgcaaaatattacgaggttgatgaattaaatacttctacagatgcattgggaactcatgaagcttatctagacacagataagcacggagaacttgaagtaaaaagagatactgccccaatcggtgtctttacatccgagggatacataactgaaattgaaaccccagatggcaaaaaagaagtattggcagcagatgcaatactttggagctctcgatttaaagatgcatgtgaacttttacttgaatggtatggtagaggcatcaacattaatacaagttgtgagatcctttattcaaattacactgtgcaagatggtatcgaacacctacagtcccccatctatttcgaaggtcatgcaattttaaattcagagaaacgtggagagcatgacattgtcctccccgcctatgattcttccaaacttctaagctttaatgaacttcaacgatttgaaagattagtggctcaagcagctacaagacaaaataatgaggaaggtgaaaaaatgaataagtttagaaaagtgtttgaattgtctcactctgacgttcggacgcttctatatagccaattagatccaacccttgataaagaatcagattcatttattgcagatgtatatgatacgtatttcatcgtaaacgtgtatagctggtcagatgaaaatagctatgacaaatactttaagttcaattacacaagaacaggcgatactgtttcaattgattttgacagtaaaactgaggtattcatgacgcgcaactgggaggaagttgttcctgagcctattcaatcacaacttaaccagaaagatgaacaaattaaagatttaacgaaacaagtaaatcaaatcaataaggataaggtaggaattgaacagcaattcaacactgccagtgaaaagcttgtgcaattaaattctgaagtggaacaattgaagccttataaagaaaaacacgagaaaactttattagagcaaaaactaagtgagaaaaatgaattctataaagcgaaatttgaagctttaaatgctgaggaaaaattcagtacagaagaagtacaaaaccttatccatgcttcggttaaacaagatgaagaaggagaaaaagctgtattacaacttaacacaatgttagttgatttagttagtgttcctactgaaacaaatacaaccattagagaattttcaagtaaacgggaaaatttaatccctaacgatgactcttttgaatcacgcttttcacaataaattttaaacttggaggaataaaatatggctacaagattacaaaaagcccttactgaagtaggtaatcatactactggaaacttgaattctttaaaaatcaaaacagttgctcacggtgcaaaagtgactggttcagacattgataactttatgcttgttgaacttggttttgatgctgaggggaaccgtacagcttcgaaactatcagataaaacaaaaaaagcatatttaattgcatctcctgaagcacgctaccttggtgaatcaatgagagatttttataacggtgtaggagaacatgctcgaattgttatccttgagccagcttatactcgttttgatgtttctgcattttcatttaatacaggagtgactgaggttaaacaaggtcaagtggctcactttgatattgctactcaaaagtatattcttagtgatcctacttcacctcatgaggattatgctgattcttctgctaagttcctagttgtaaataatgaagatgaccttgtttacacaatgggacaaaaacttgttcgccttgaagtaatcgaggcctaatacataacaaataaatttcaataaaaggagtattttaaatgaaattagatactgtgaaaatcaaaggcttgtttagccgtgtattaaataacaaaatggacggtacagacaaagctgatatccaaacttacattaagaaagtgtttggtgatggcggtactacacctgacccttccatgctccatcaatttaataaccttgtcgttgaacaagctgatgaaattgcgaaaccaaaagtaacacagctcctctcccttctggccaatgtccaacaagaaaaacgaggcaatattaaagaaattaaaattccaaaaaagaataaagcaaaagtcatttggtctgctacaggctctggtgttgatttagttcgtgttgaaggacaagaaacagttcctgctgttccgaaaactatgtcaacaggtttctattatgaacccctagatctcgtaacagattcaattgtttacttcaataaattggtgaatgatatcgcagatgctaaagtccgtttgtacctcgataaaattcatcaattaactgcaagcgcaattacagctggtaaaatccctgcaaaaaatgttcaaacaggctcaaaccttactcttcaacaatacaacaaagtagcttccgtgcttcaacgttatggtggaaaaccaatcttcgtcgctgacactcttctcattgactacttcgcattccaacaaggaacagactctacgtttaagaacttcttaacagaagaagtaaaaggagagctccttactgctctaaatccaacaactatcggaagaacaactgctgttaacctcactaacccatttacagatgatacaaatagtaaagtcgaacttcctgtcaacaaaggttatatgtttgccggcggcgtttctcaaaaaccattttctgttgttgagtatggcggactgcgtcaattgacagaacaagatatcgaagatgaaagaatcaaaatgaaaattgttcaagatgcttctgttaaccttctttttggagaagcaatcggaattattgaagaacaagctgcagtatctatctaaatcaaaatatgaggattttttaggaggatgtaaatttgactgaaaaaattaagttagcacgatacagaagtacgtcttattttgttgggtataccggcgatggtggacataaacaatacacttggtctggtagtaaaaatgggaaggctgatattaaagaagttccaaaagaagttgttgaatggctcacaatgaacagcgtttgtttcgataaaggtgaattagttattgttgaagataacgagacaaccaaagagattaaagattctattgttgagtcggaggcttatgaaaataacattcataccaaagaagaaattgaaaagatgattaaatcgggaaatattgctcaactaaaaaataagctcgataaaatcacagtggattctgagaagcaatttattattgacgttgcttcagaatttagtgatgacattgctgcaggcaaattaaaagttttggctgattggatgggagtcgctgatccttcccttctctttgactaagaggagggatttttatgacatcttatgatcaaatatgggaaacctttttaaacaactgcgagacgtccgattttgatgttcctcaacaagaagaggacatttataaatcaattcgaaatgcaatccttcatttcaataaccggcttagagacaatttaaaagctgataattcaactgaaactgttaatcgagaattatctgaggatgatcttcttattcttgcacacttcttgagatacatctttttgttaaataaaaagaccttgtttgagaatacgtggcagcccttcacgaatgacgtggggatcaagaactttggtacgcaactcaattcacttaaacaaagtgtaatggatcagaaagacgaaattgagcgcttgatattgaacgctgcggtggattatctatgagtacaattaaagttaaatcggcacataaagatggacaaataaagcttgaggacttagatgttgtttgcaataaactgtgtaaaagaaacaattcagtcctcttcaaattggagaaataccttaataaaaagctgctaagtgatcctgaactcacagaaatcagggacactattttaacagtaagtggtgaattaagcagacttagggataacttagtaacagacggtgattcgaatgaaggactacagtaattaccacaaggttaacattaataataaacttcttcatgatggtaagcttattttccaacaaggccttaaggggtttgaatctgaaaaagtcacaattgatggaatcgaaaaaacagtaatgatcacttctaagtactctagtggcgatggttctgcaagatatatattaggtgaaattgctgacatttatcgtggcggagttgttaagtttaatgatgaaacatggctcatcacctcccaccctctcagtaataagatttacaaaaaggctgagataaaaatatgtggaacatcattttttcttacttcagaagacaagctaatcgatactggcaaaattaacgaaatcactggtaagccaatttatgaaaaagtacctggcgaaaaaactgaagtcccctgcatattcgaaaggacaacttcaataaatggcactgaattggcggtaaatcttcctgatggtcaagcaaacattacaattccttatcttgttcatgaaaaattgaaaatcggacttaccctcaccttctttggcgaagattatcaagtcgatgatatagactattctaaagtttatggagaccacggaacaataaaattggttgccaaaaagaaagttggtgaaaagacatgagcatgactgttgaacagatgacaaaagtcttcagattagttatggatgatgttgaactgaatcggctcttgtattacaaaactgatcctctctccccttctcatccagatgttcaatcactcgaaaattattatgactccacaaatgactctcccgctataatcaataccatattcaagcgagcacctaaaacagatgatctatcggattcaccattatgtaggatgtgtatttatttagggaatgcattgcctaagccgacaaaccaaagctttatgttgttaaatcaagaattgatgatcgatgtatacacacacattaatacatttgagatatctgagtatcgaagtttgaaaatcatcgacagggtttcaaaattatttttcaataaaaatattgctggttttggtgtaacagtagattataaacgtttgcttattagtaatccccctgacggatatttgggctacaagatgatctttacttttggagcaagtaaatgaatgagttaaaggatttctttttcttaggaaaaccgatccagactgaaataggagagattgatttcatccgcttaaaagattatcctctctacaccaaagaactaagcatgttgaggatgaataagaaaagtcttattaaagaatattcaaggtttaatgaggatggctcgcttgacccatttattattgaaatgaaaaagagagatctttatgaaattgtacattcggtactccctgattttcacgaggcttatttcaaagttttttcaaaagtattgataaacaaggattccctatcgttgattggaaaacataattttccccgtctccgaaaactaatactagacatgcattgtatcactgaagacaaggtcgttgacaatgatgaacttcaggagttccatgatataagtaaatcactcaagcaacaagattctcaaagtgatttaaaggatatagtaagctgtgttgctgcatttaacggatacacgtatgaagaaatatctgaaatgacgatgtatcaactatatttgtcgttctacaggatggctgaagttatgaattataacacaaccacactttttgctaccgtctctcctgatgtcaaagtaagtgattggagtagtcacattaatctttacaaggaagagtcttatcacctgagcactaaagatgctaaaaatatcgagcaattatttggaggctaattaactttagtctctttttatttttatttaggaggaaacaatttggcaaaacaaacagtaatccatgaagttggaaaaattacagctaaacgtctgagcgataataaggttattgcttcaggtgttacacaaatgactcagttttcccaacaagttcaacaagactttttaaaaggcggatggggtaaccgagacctgtatgttattaattcaagtaaagaagtatcgggtaatgtccgaaatgctttctttgatcttgatttcatggcaatgcagcaaggtgtaaaaattgaaaacgaaacaatttctgtgtgggaagatgaaagcttaacagttagtgatactggtacggttatcctttcatatctcccattgtctaaagtttcattaactaacgaagatggagatcaaattgaagttgacgctgcatctaaaacagttactgtgcctgatacctttgcaaccaagggtgaagctttagcagttcattatcaaattgaagttgaagccgagactgttgaaattaacggtgaaaaattctctgagaattactactttgaaattcacacaattgaatacgatcctaagacttcaaaaatctacagtgacctttatattcagctccctaaagtaaacttctctggtgaagcagatatgtcgtttgaagcaggaaatgcatacactccggaaatcggctatcgagcccttgctgataataacggaaaaatcggtaactttgctcgtgtaaaacgtaaagctgatgggacaaagggcgttgtcactagtgatgaaggaactggctcatctcaaagctcagatcttggcggaacaactgaataattaaggaggcgtttattattgcttttttaaaccaggacggtgataaatacacctctgcaaaagatgatgggacaggtaatcccataacagctgtatcaattgaacgttccactgtccccttggaggttggtctcaataatgaccagcctcttaatgttaatgtggccaacactgcacttgatgtaaatataactaatacggcttctgtccctgttttggttaaaaacactgcagcaattaaaacccaagttcaaaaatcctattctgaatttgttgttactgatgctgataccgtagctacaggtgcaactaagtcttatacagttgatctaatcgattcacttggtgttttcagaacttacggtgttgctatgtacacaactcaaacagacagctcaaacagcaaagttttagcaagtatttattccgtaccgaaaaacatcccattttattctgcaactacatcaggtaatgataattctgttctattcaacagcattgtttttgttcagaattaccctttacaaaaacaattaactttcactgctccaaaaatacatctgacagttaaagcagccggtacagttgatctaactgggttaaaaatcgttgtttgggggatggaataatgacatttgatgaagtatgtggtctgttcaaacaatttgatggtttggaacaaaaattcctattactatcagatggatcctatatcagtgttgatgatttcaagcaacgctttgaaggcgacttcaatgagtacgaacctttaagttcgcttcagtcatccccttcctctaccccagcttgggaaggtatatggaataagctacaagaggatgggctttttgaataagtcctcccctcttgtttttctagataaaagacagtttttattcaaattaaggaggtggagttgttgacagaaacgactgaaaatgtcgtaatcacgattccagacaaaacttcatttacatttcacgaagccgcaacttccccatctgaaggtgaagaatttgtagtgggtcattttcgggaacttactgttaagatctctggttcctcaacttcacgagaaataaagttttatgcagttgatgaaaatggcgaaaaaactgcacttagtggcaccaataaaacagacttccaacttgggagcagtactttaaatactaatgagtattgggacttcgacattgctggattgtttaaagttatgttcgaagtagtttctgttactggtgatgtaactgttaaagggattgtggtgagttaagatgagcagcagtaaatacgtcggtcaactcaaacaaaacaatattcagatcaattcattaagaggatccaatgacagagctgaaaaacatatgcttgagcatgaacaagcattaacagaaaaaacaaatttgtttatggaatatcaacagaatgagctcaagaaacatactgatgataagtctaatcctcatttagtcaccaaagagcaggttggtttgggcaatgttttaaataatgtccaagcaactaaagaggaatttgacgaacatctaaacgatactctcaatccccattcagtaactaaaagccaagttggtttagcaaatgtcctgaatgaaaaacaagcaactaaaactgaatttgatcaacatgctcaagatacaattattcatattacagcttcagagagaactacttggaatgccgcggaaagcaattctaaaaagtatactgacgcacattctcagaacacaaacaatcctcataaagtaactgcaattcaggtcgggttaggaaaccttacgaatgataaacaagcgacaaaattagaatttgatgctcacataaaagataatgagcgtcatatcactagcactgaaagaagtaaatggaattctgctcaattaactaaaatatcaagcgatgatggtcaaccactagtttctataacaagcgactttcattctgaacttttgaattctcctactttaacatatttcggatatgataaggctgccttagaagcacctccaagtaacgggcggggattttggacatgtagtgctgataaactttatggtcaagctattgttctgactaatgataataagacttacagaaaatcattgataaacggagcatggtcaagttgggaacgattgataagtagcagtgaaattgataacgtgccttggttaagcgttacatataaaaatggcgcaaagacaggctcaaggccacttcaatatcgtaaagtagctgggactttgcagcttagtgggcacgttgtaacaaaccgagatgtagtatttgcttctattccaactgaattttctccaacacaaggtgctgttaagtctgttgaagtgagtggaactttcggcagaagtaaattatttgtaaactctaatggtgaccttcagctaagtggggtatcagctgacaacagtgctgcaataacgggttactacatagatgtagttgttccgttgaattaggaggtaagtcgtgatacaagtctataaatatgacgaaaattttatgttcgttgaacccctagttgtaactgaaatcgatgaaaagggagattatatttttcccgataattgcacttctgttccattacctgactctccctcctattaccttccacgatttgatttatcaaaacaagtttggatagaaacagcctctcaagaatatatagacagcctctcaccgccccctgaagaaccttctgatgtggaattacttggacaatcactagctgaagccagaattttaattttaaaacaaaatcgcataatcttaaatttacaaaatgaagttaaaaacttgaaagatgggacaacagcatgagcaatttttgggttatagccctaaacaaaaactgggcaactcttgatcaggttaaagaagcttattattacgatgatgtaactaaggaagaactcaaagaaggagtagacaataacttaattactcctgaacaatatcaagaaattgttggggaagcctatacttcagttaccttatctacagaataaacacgttatcattgtttgctcaaaatgaggatattaaggaggatattaaatggcatcaaaaaaattgaatttaagtttaattgaggaaagtgtcaataagtatgacaagaaagaaaaagtccaattaaccgatgatgtacatgtattcatctacccatacttttctccttctcggttaacaaaaatgctaactgaaatgatctctgatcaacaaaaagctgaagataaaggtattgattttagtaaaatcaacactgttcaatgggtattcttttcaattgtcaaagaattttcagatttggggattccgaatgacatcaaaaataaagttaaatggtaccttaagcttgtagattccgaattcttccctatgattattaacagttttccaaaagaaagtatgaagaagcttaaggatgcaacaaaagctttagaaaaaatcactgaagacttgttaactatgagccaccaggaaatcaacaagcttattctagaaaaggtagaagaaatagagactggttctggtgaagttagtggcgaaaacaattaaagatatcaaagctatggttgaacaagctgcaattcaatcaattcataagtcttcctctaatgtgaaacaaattatggtaaaaacaggacaagagcatattgttgaagatgtttacggtgcatatgatcccctactttatgaacgcacaggacaagttaaagatgcctttataaccaccaacgaaagcaacggggtgtcattggacaatattagagaagatgatggaaaagacattgctacagttattgaaaccgggcaggggtatacataccctgattcatatggatatggatacggtaaccctcgtccttttatgaagaatacctctgagaccttaagagatggacgattaaccgcagcgctaaaaaaagatttaaaagcagatggtattaaaacagactaatggtggtgaattaatgaccaaaccaattgaaaagaatatgctcagatctcgagcaataaaactccccgaggtcacggaatcaatgtgggagcaagtagatgaagagcacagaaacttggttcaagagtttttagatgctcattcatttagagataaaacacgaaagcagtattactcctcccttcgccaattcttttggtgggtacatacctctcttaacgggaaaaaactttataagatctcaaagcgtgatttcattaggtatcaaagtttcttaaagaatcgtgggatgtcttcaagtgggattgctttaaaaaaagccggtgtatcatcgttaaataattatatcgaaaatgttgttgcagaagatgatcataattatgagaaattcagaaatttcacccgcgggcttccagctattcctaaaaccactacctatgaaaaagttaaagttacatatgatgattataaactgatgatggacgccctaaaagaggacgaaaattatttggggatggcatggcttgctactgcctttaatgttggcgggcgaagagcagaactcatacagttaaaaacagaaatattagattaccctgttccagagggtcagtcatacgtgatgagtcataaggtatttggaaaaggtaaaggtgaaggaaaacctcttgagtacatgattaacacagaagcactggagtatcttcgcttatggcatgaaaaacgtggctatgatcatgaatacctcttcactactcagtatggcggagagcctaaacagatgtcagagtcttgggctgattatttttgctctgatgtgttatcagacatccttggtcgacgtataaacccccacctctttaaagcttcgtgcatcacttatctcctagaagttaagaaagtcaaaattgaattgataagcaaatatgtagctcatcatgaagatgtctcaacaacaatcaaacattatgatttacgggattttgaagaagaaaaaaatcaaatatttgtttagttttaagcaccacaaatacatcctgttgaatctccagtactccaccttttacaaaatctatttccggtacaatctccaaaacaaccattgtcccccatcgttccacaatgaactaagtttaaatcaacttcactcggtgaaatccctaaatattttgcaacaatatgtatatattcttcctcctccatcggggcccaatagttcttaccatctatttcgataattttccacccgaatttagaatacatgtattctggaatggatggcatttcagtttcaaaaaagactttttctcctttttcatatactctgattccatggattactttcacgatatctcctccaattgataatttgagcttagtgttaaccattagagaaattctattcaattcagcataaaatccctcttttattcagaatcaagattcctcgtttgagggattttgcttatgtataaaacaaagaatcactttgtcccccgataaagacaaagtgattttaaaattagctattaggtaaatctacttttgcaggagtactagtccacggtttgcccattttctttttatgggctttatcttcaaaaaattgaactgtagcatactgataccaactatcagtcattgctcctttttcgtataaatcatatttataatacgcatcagggatttgttcttttgcccaataagagaataaaatagtggcagccttactcccccatcccaagccagggacaataccgactaatgacattgtaactgataacgcatttttagctgcttttgtatgcccagataaagtccccacataatggtatccctttttaggttttgcagcctgtgttgtgaattcatttgatttcaaattattgttttcataatttgttctgttagcagcattttcatcatactcaaagtttaagcctttttgttctatgccatcgacttttacagtatgatcatttccgttcatctgaactttgtgagtttcatttccactcacatactcaatttcaactaatttcccgttcgatgaaatcttttcacttttcattttgtaatgtagagctagttcttcgtaagaaggggttgtcttagagtcctcctttgcagtagcgtaacctgcaggtaaaagtgagcctaaagtcaatgatgcagccataacacaagtaataactcttttctttctcaattgaaatcctccttgtgttacaccttaagaatctgaattactaaatacttgcttaattttataagcaattacagcgaggtataaaattgcaacaaacactaaaactccagtgccataatcagtttttgcaactagaaaaagacttaacacaccgaaaataatgtacattacaatatcaaagatatttttcttgttgttcatttaaactcccccgtttagcaattgattccaggtgcatatttgattgcagccccagtgtattaaatacttacaattttgtccaacccgaactctctggcaatattactttaatcatattgcaaaataattttttgaattatttcagcacacctactctaacatgattcttttttgatttacataaaaaatcgaaaaattgagtcatttttccttggagaatgactgtgtataaatcttaaaaaggactattcattcattttgaaaattagagaaacgtactctcagaaacctaatttccattaaaatcctttgcgtatttgtcgataatatggagaggtgatgaaaatgttcaataaaaaagtattaaagcacaatctggctgaaatgaatcctaaagaattaataaagtttatcaagcatgaatttcctattaatggacaagattatcatacacatgcaaggaaagtccaaataataaaatctttaagcccgtctgaattatcatctgccattgcaaggatggaaggaataaaatcgcaatatgatccatctaaaacttgggggattggaagtttgattttgggaacatcgtttataggatttcaagtattatttggtgtgaatatatcaaaaattactgagggaaaccgattgaatgcattaatttacgtattaatcacaatcataatttgcttatggacacttcgtaatattataaaagataaagaaaatgctacaactgcagattatctcaaagaactgctcattcagataaaatcagaaaagaactaatgatttcactttccatttatacagttctccatgactggaaacaatggtataatgtaggaaaatgataccggcggtggttgaatgggatataagtttatggcttatggtggctattttttattctgtcttttctttttgctaatggacggctggagaggcatgggaatttgcttaataattgtaggtttagccctattagcacttgagccctataaaattaaagcccaaaaaaatatagataaactaaaagaaaatgcggaaacacttaagcacttcgacggtggttttaatccagacaatttctttaatacttacaaaactaaaattgcatttaaggaatctgattcccttgtgaaaatatatcagcttaataaagatgaacatattgaagaatacacaatccctttttccaatgttatagaatccgaaattgctttagacaatcaaataatttctaaagtatcaaaatcaggaatcgtagctggtggcctgttagctggaggaattggagctgcaattggagggttgtctgcctcttcaatacaaaatgaaatggtcaaatctgtcacgctaaagattactgttgaagacctcggtaagcctatccattatatcgattttctccccacacaagaagttgaagggtataatattcaggggtataaaaaagatagcaatgtcattcaacaagcacttacgaatgcagaatattggcatggtgttatggatgtaattattaagaaagcaaacaaagtcgctcaataactgagtggcttttttctttgtcctctcccctactgaaaggaagtgattcttacttgagtcaaaacctcaaaattatactaaccccgcaagctgatacctcatccaaaactgtcgaacagttaaatcagcaaattaaatccctggaaaagaaactcaactccctcaagctcaatacaaacattgattctacaaccttaaaagctctgcaagaattctcctctgctatcgacacatatcagaaaaacctaaaatcctataatcaaacagttaaagaaacctcaacagtaattaagaatgctgacggatcagttgaaaagctcacccagcagtataagaaaaatggtgagatacttcaacgtgaaacaaaaataatcaacaatcgtaatacagcattaaagcaagaaactcaagaggttaacaagctaacacaggccactgagaaactaggacaggttcaaaaaaagactgtgcagagaaatctgcaaggacagccaacaaaggtagtgcagaaaaaccgccacgggttcgatgatattgtttatacaactgatcctaaaactaattcgacctcctcaaaaactacaactaattatgaccaacaaaggagagcaattgagcagcttaagcaagatttagagaagcttagacagcaaggtattgttactgatacgaccatctcatctcttggccgaaaaataaacacagctcaatccgctcaacaaattgaagcactgcaaaataggataaggatgttagatgataaatctgcggcagttgcgaagaacaatgaattaaagaaaaccattgaattatatcagcgacaggcacaagtaaatgttcaaaacctaaatacacggtatggcagttctatgggctctagtaatagacaagctgttcaagattatttgaatgcagtaaatagtcttaatgtaagcactggaagcaataatatcagatcacaaattcaaagcttgaatatgcaatttagagaattagcctccaacgctcaaacagctgctaatcaagcctcttcttttggagcagaactaacccaaaccttcaaaagcatgtccacctatttaatctccggttctttattctacggagctatctctggacttaaagaaatggtatcccaggcaatagaaattgatactctcatgacaaatattcgccgtgttatgaatgagccggattataaatataatgaacttctccaagaatctattgacttaggtgatacactttcaaataaaatcacagatattcttcaaatgacaggcgattttgggagaatgggtttcgatgaaagtgagctctccacgttaacgaaaactgcccaagttcttcaaaatgtctctgatttaactcccgatgatacagttaacactctaacggcagcaatgctcaactttaatattgcagcaaatgattcaatatcaattgcagataaattaaatgaggttgataataactatgctgttacaactctagatctggccaattctatccgtaaagctggttcaactgcttctacattcggggtagagctaaatgatcttattggttatacaactgcaattgctagtacaacacgtgaatcagggaatatcgtcgggaactccttaaagacaattttcgcgcggattgggaataatcaaagctcaattaaagcgttagaacagattggtatctcagttaaaacagctggtggtgaagctaaatcagcaagtgatttaattagtgaagttgctggtaagtgggatacgctttctgatgctcagaaacaaaatacttcaattggagtagctggtatttatcaattatcccgttttaatgcaatgatgaacaacttctctattgctcagaatgcggctaaaactgcggctaactcaacaggaagtgcttggagtgagcagcaaaagtatgcagatagtctacaagctagggtaaataagcttcaaaataacttcactgaatttgctattgcagcttctgatgcttttattagcgacggattaattgaatttactcaagccgcaggttctttgcttaacgcttctacaggagtaatcaaatcagttgggttcctacctccccttttagctgcagtaagcactgcaacccttttgctcagtaagaatacccgcacattagccagcagcctaattttgggcacacgtgcaatggggcaagaaactttagcgactgctgggctagaagctggtatgactcgtgcagcagtcgcctcaagagttctaaaaactgctcttcgagggttgcttgtttcaactttagttggcggtgcatttgctgctttgggatgggcgctagaatcattaatttcttcttttgcagaagctaaaaaagctaaagatgattttgagcagagccagcaaaccaatgtcgaagcaattacgaccaataaagactccactgataaactaatacagcaatataaagagcttcaaaaagttaaagagtcaagatctttaacttcagatgaagagcaagaataccttcaagtcactcagcaattagcacaaactttccctgcattagttaaaggctatgattctcaaggaaatgcaattcttaagacaaataaagagcttgaaaaagcgattgagaatactaaagagtatttggctttaaagaaacaagaaacaagagacagcgcaaagaaaacattcgaagacgcttctaaggaaattaaaaagtctaaggatgaattaaagcagtacaaacaaatagctgactacaacgataaaggtagacctaaatgggatctcattgcagatgacgatgactataaggttgcagctgataaagctaaacaaagtatgctcaaagctcaatctgacattgagagtggaaatgctaaagttaaagatagcgtcctttcaattgcaaatgcttatagttcaattgatatcagtaatactttaaagacgagtattagtgatgttgtcaacaaacttaacttaaaagatgatttagatcctgaagaattagaaaaattctcctcttctttaggaaagcttcaagaaaaaatgcaaaaagctttagattcaggcgatgaaaaagctttcgataacgcaaaaaaagatcttcaaagtctcttggaaacatactccaaatccgattcttctattgatgtttttaaaatgagcttcgacaaagcacagaagaacataaaagatggagataagagcttatcttccgtcaaatctgaagttggtgatttaggtgagacgctggcagaagcaggtaacgaggcagaagattttggtaagaagctaaaagaagctctggatgcaaatagtgttgatgatattaaggcagctattaaagaaatgtcagatgctatgcagttcgattccgttcaagatgtcttaaatggggatatttttaataacaccaaagatcaagtagctcctctcaatgatcttctggaaaaaatggctgaaggtaaaagtatttctgcaaatgaagctaatacccttattcaaaaagataaggaacttgcccaggctattagcatcgaaaatggcgttgtgaaaattaaccgtgatgaagttatcaaacaaagaaaagttaaacttgatgcttataacgacatggttacctacagcaataaattgatgaaaacagaagttaacaacgctatcaaaactttaaacgctgataccttacggattgacagcctgaaaaagctacgaaaagaacgaaagcttgatatgtctgaggccgaactgtcagacctagaagttaagtcaattaataatgttgcagatgcaaaaaaagaacttaaaaagcttgaagagaaaatgcttcaacctggtggatactccaatagtcaaattgaagcaatgcaaagcgttaaatcagctttagaatcttatatttctgcatctgaagaagccaccagtacacaagaaatgaataaacaggcacttgttgaagctggaacatcattggagaattggacagatcaacaagaaaaagccaatgaagaaaccaagacttccatgtatgttgttgataaatacaaggaagcattagaaaaagttaatgctgagattgacaagtacaacaagcaggtcaatgattatcctaaatactctcagaaatatcgagatgcaatcaagaaagaaattaaagcacttcagcaaaagaaaaagcttatgcaggaacaagctaagctgcttaaagatcaaattaaatccggtaacattactcaatacggtattgtaacctctacaacttcttctggtggaaccccctcctcaactggtggatcatattcaggcaagtattcaagctacataaattcagcagctagtaaatacaatgttgaccctgcccttattgcagctgtaattcagcaagaatcagggtttaatgctaaagcacgatctggtgtaggtgccatgggattaatgcaactgatgccagcaacagcaaaaagcttaggagtaaataacgcttacgatccttatcaaaatgttatgggtggaacaaagtacctcgcccaacaacttgaaaagtttggcggtaatgttgaaaaagcattggctgcatataatgctgggcctggtaacgtaattaaatatggtggtatccctccttttaaagaaacacagaattacgtcaagaagatcatggccaactatagcaaatcgctctcatctgccacttcttcaatcgccagctattatacaaataatagcgcttttagggtaagctccaaatatggacaacaggaatctggtctccgctcctccccacacaaaggaactgattttgctgcaaaagcaggtacagcaattaaatctcttcaaagtggtaaagtccaaattgctggctacagtaaaactgcaggtaactgggttgttattaaacaggatgatggaacagttgccaagtacatgcacatgcttaacactccttctgtaaaagcaggtcaatcagttaaagccggtcaaactattggtaaagttggtagtacagggaactcgactgggaaccaccttcatttacagatcgaacaaaatggaaaaacaatcgatcctgaaaagtacatgcaaggtattggaacttctatttcagatgcgtcacaagctgaggcagaacgacaacaagggatagctcaggctaaatctgatcttctctccctccaaggagatatcagttcagtcaatgatcagattcaagaacttcagtatgaactagttcaatctaaactcgatgagtttgataaaagaattggagattttgatgttcggatagcaaaagatgagtcaatggctaacagatacacttctgacagcaaggaattccgaaaatacacctctgatcagaaaaaagctgtggcagagcaagctaaaatccaacaacaaaaagttaattggattcaaaaagaaattaaaacaaataaagcattgaactccgctcaacgtgcacagcttcaagaagagcttaaacaggccaagctagatttaatttctgttcaagaccaggttcgtgagctacagaaacaacttgttcaatctaaagttgatgagacacttaagtcaattgaaaagtcatcttctaaaacccaagggaaaattaaagatgtcgataacaaaatttcaatgactgaagaagatgaagacaaggttaaatactatagcaagcaaataaagctcattcaacaacaacaaaaggaagcgaagaaatacattaagcagcttgaagaacaaaagaaagctgcgaaaggtttccctgacatccaggaacagatcactgaagaaatcgaaaactggaaagataaacagaaagattttaaccttgagctttataacaccaagaagtcgatcaaggatatctataaatcattggctgatgaagttgtatccatctacaaagagatgtacgaaaaaatgcgtgatattgagttagaagcgcatcagaaagcgactcaagacttgatcgatgagatagacaagactgatgacgaggctaaatttcaaaaagaattaaaagaaagacaagacagtattcaaaagttgactgaccaaattaatcaatactctcttgatgattctgaattcggaaagtcaaaagtcaaagaactaactgaacagcttcaaaaagagcagttagaccttgatgattttctaaaggatcgcgaaagtaacaaacggaaagaagcgctccaagatcagctcgaaaaagatgaggagtcaatcaacaataaatacgataatcttgtaaatgatgaacgagcctttaaaaagcttgaggataagattatgaatggaaaaatcaccgatatcgctaagcagcttaatgagttttctaagtttattaataccaatatggagtccattggaaaaagtatttcaaacaacctgattgataaactcaaagaagcatctaatgcactgaatactgctgtcaaaggcaacacgacaggtaaaaaagtatcctctttcgcttctggagggtacactggaacaggattaggtgctggtaaacttgcattcctacatgacaaagaactgatcttaaataaaactgacacagccaacatccttgatacggtaaaagctgttcgtgaaaccgctgtggacgattccccaaaatggggccaaggagtaaaattagcagaccttattaaaaaaggaattacttctattccttcattagttcctaacgttaatcaatcaatgttaacaaacagtttaattccaaatttaaagaagattgagatcccctcaaaaacaattgcttcttctggagataaaacaattaatttaacgaatactttccacattgataagctaataggaggagaatcgggagcgagatcgatgtttgaaagcattaaaaacgaagttgtaaaactaaatggtagcatgtaagagtctgcaaaagcagactctttatttaacttaacttgaggtggaaactcatgattagagaaagtcaatactttatgttcaataatatcccttcttatgaattaggagccgtaaatgtaaatacagaaggaggacttttagaggagtcgtttattgcaaatagaacagtaaatgaaacatacactaggctatcttcagaaccatatgtagacaatgtcaaacttgagccatatgagatcccattgaatttttacatagaaaatcatctagatgaaaaaaatgttcgaagagttgctcgttggttaaatgtagatgattataaacctctctcctttagtagaaatttagacataatttattttgccttgccaataaacgctacagatttagttcataactgttctaacgatggatatgtgaagctcacaatgaaggtattcccctataaatatggacaagaaacaacaactcattggtttgatgtcacatcaggtgttaagaatattgaaattgaaaacataggagatgtggacattccgttatctcttgaatttaagaagataggcgacggtgacataactgttgagaacttaactttatatagaacacctctgaagtttacgggaataaaacatcatgaagttatcaatgttgattccaataaaaaattgatcacttcaagtatttcgggttatgaatgttatgaccaagtaaatgaagagtatgtgattttaacaagaggtaaaaacagaattaaaataaatggtgagtgctatattcgattaaaataccgatacaaatatttataggaggatgtattttgttaaataagtttaaaccaggcgaaatcctcctttctttagcaaaaccaaataaaaagaaaatcgctaatattgcggatttctcaaatgtatctcttaatctaagctttgctgatttaaatgatctatcttttaatattccactcaaagccaggtataattttttgatgaagccaaaccatgtggcaaaactaatgcgtgagtggtatcttatcaaggcagaattcttaaacagagttgaatggtttgtgataaccggtttaacaaaatcagaaaatgaggagcaaacaatacaagttagatgtcaaggactaccgtacatccttcataaaaacaaaataaggtcatatcaaggagtttcaaagaatctacaggaagtggccactgattgtcttaaaggcacaagactcaatatcggttatattgatccttcatttaatgaaaaaagacgatcatttgatgtcacttcaacaagatatgagtttttaaaaacgatatgggaaacttttgaggcagtcccagtcttcgacactgtaaagaacactgtctctttttataagaaagacacagtatccaagtacaaaggtgtccaattctcccctgaacgatttatgattgatatggaagataccattgatattgatgaagtcgtaacacgtttaaacatcacaggtaaagacggaattgtgattaattcggtaaaccctactggacagagttacttggacgatttttcttattttctatatccttttaaacgtgataaaaacagaaatgtaataacacacagtgattacatggatgatgatttatgtcatgcgattttggattataatgaacttgtcaataaagaaggctcttctttccacctccttttaaaccaaaaaagggatttagaaacccaaaaaacgactcaagaaaataaactcttcactcttgaaaacattgagctacagcaaattttagataagataaccgtagcgaaaaaagccggtgacgacacaaaagatcttattaaacaaagagatgcaaaactattagaagttaccgccaaaaaagctgaaatatccagaataaactcgcaaatcacaaacatttctcaggaaatagaaaaactaaaagaccgtttatcgatggacaagtttcttggtgaggagcttaagaaacaactgtcttattttatttttgaagatgattggactaatgataatatttttgatgagacagagctttacgaaaaagggttagaggaactgagcaatagaaacgctccccctgttgatatcagaacgaacatcgtaaacctatttaatgttaatagcgaaaaggcattttgggatagaatatatctcggagatataatcagggtagttaataagaatttcagaaccgatgtcaaagcaaccctttcagggatgactttcgattttgatcaacagagtatacaggttacactctcaaacgggaaaagagccaggtcattggaacaggaatttgctaatactttgtatacaactaagaaagcatccacagagtataataagaaaaaaattgattatgatacacttcttgttaattacaatgcacgtaatgatcgtatctcatctcctgtggcaaacccaactattcttaataacggaactgcaataacacatgttgtcaacgataatggatcggttgatatctccattgaatggcagttcccaaattctaaagaggataagtacaatattgacggattccttgtccactgttactcagatacatcttcagacacctatatatttggatcaaagatgtcatctgaacagtatctatcggttagctatgataagagaatcgcaacccttacaggccaggtttcaaataagtattatacgtttggaattcaagcctaccggactgttgaagcgtctattgatagcagcggacgtatactttccgacattattcaaccccaatttccttcagagaacccctacctcccctctaattcggttgaagttaaaggaagtcttagtggaagagttaatggcctctatacaatctccacggaagctaagccagaagatccggaaaaagggacaatctggatcaatccaaagaacaataaacaagaactatttaacggagaagaatgggttgtctcatctgcaggttcagcagactccttgaatggttttacagcttcaacaacgacttctccaaactctataccagtgcgtaatgaatcagggatcattagtggttcaatagacggtaatgcagagatgctaggtggacgagcagcatctgattatgcattagctgaaaacatccccattcctcccaagtttgcaaaaggtatttatacaggagacggcactctcagtaagcaaatcccccttacctttactcctgatttagtcaaaataactccgatttcacctgaagacagtcaactagtaattgaaagccaattggggggctatgcctatcaagttacttcaactggactttcccttattggaggagatttaggatacggtgctttgggaaacaatctatttgtcacaggctcagatagtaactgcagaggaaataaattaaacgttaaatatatctgggaagcctaccaacaaaattaacggaggtgaactaaactggctgattttgctaaattatataatgatccaatattaagtaaaaagagaataggttctgttgaagacccctatctaacttacaatgaaacattgacaatatttaatggaagagcactcctaactgagattccgaacagagaatttcgtgttgaagttactggggacaacaaggaatggcgagagattgaagatggagaacttgacgacaactattttaaggttgattaccttatgggagttgtcttttttaatgcttcaaatgaaggaaaatcgctaacctttaattatagtggtgaaggagcttccttcttccctgcctctcgaatttggataaaacgacaagggaatatggttattgaaactcttcaaggacttatcgatgaagctgaagatacaataattcgaatgaatgaacgtatagctgaatgtgaacgagttacaaaacgatgccaagaagtgacagcctggtgtagacaggctacatcaaattatgaagaagttgtagaaaacacaagaaaaatttataaaccatctgtctatacctattcagatattttcacctattacccaaccccacagattggttggacggtgactgttaaagaaacaaaaatcgtttatcgatgggatggatttgagtgggtagatattggaacttccgaagtatatgaaggttttaatatactcctaagcgcaacagaaccatttaatgcaaattatatctggtataaggatgcctctttttcacctgagaaaaaacgagttgttgtttcagatacagcaccagattcaggacaagtatggtacaaaactgactaagatcccctccgggatcttttttattggaggaaagttatggctggtttttatagatatgatcaaaatttagataaatatgttccgatgcctgttgaactactagcttcagaaggagaagaatacaccgctcctaagattactcagaagtttaatgaagtagaaacgaaaacaacagaaattttaaacaaggtattaactgatgacagatattttacagtaacaagttcttttaaacaggatgccacacttggtattgagtactatgttacaaaggttactcctaaaacaaccgaagctaaaaaaagtatggtgcaaaaaacgtttgcatatgactttgaaaaatccattgatcccacatcttcttattttggtacaacaaatcgtgaaacagttttaagtatggcaaaacgaaaaagatctgttgttgcaataaacgctagtggttggcgatcaaatggtgaagtcatggggcttcaaattaaagacggagttctctacaaagattatgacgctgctggatacacaggcgctgaggcttgtgtattttttgatgatggaactatgaaggtttacggaaacagagaagttgatgccgacatcctaatttctaaaggcgcacgaaactcttttgcttttggcatttggctagttaaagattctaagccaagaacggctcaaatgactacatgggcagatttaaatgttaagcatcctcgacaagccattgggcaaagatctgatggtacactagttatcattactgtagatggccgctcacttcgatccagtggtattacagcttatgatatgccatctttatttttatctgaaggctgtattaatgcatttcttttagatggtggtggaagctctcaaactgctgttgaaggaaaatatattaataacattagtgatggcattgaacgtgcagtggtcgataccttaacaatttcatatcctgatgacgatacagatagcagattttttgaagttcaagaaggaagaggtttggcaacaagtctaaacagacgtgtagagtttattgaatccaagcctacttggaatgtattagatttaggcttctcaccagatggcttaatcgataatacagctaagtttaaaaaagcccttagtgatttatctgaaaaaggtggagggaaactacattttccgaaaggtacatatttaatcggtaagcagaatacaactagcgctagtgaaaaaattgaactcccttcaaatgtctcaattgttggtgaaagacgatcctacactaaactccttcgaaatccaaatcactcacttgatgaattgttgcgaatcacagatcacaattatatagaaggcattgaaattgatggcaatagcagtgtaaataagagtagctgccgattgatcgcaggtggaaatataaaatcatttaaaatgaaagactgcagcttggttaatgctacagaccgaggagtgagtattcacgggatcggcaagtctataacgattgaaggaatgtatatttccaatatagccaacgagtgcatcaacgttgctgaaggagaaattattaaactaattgactctgagatcacatttagcggtactgccctttgggtgggtaatgctgcaaatatcttcactaagaataacctcgcaaaatccttaaaaaccttcgtccggtacaaaaactctcaaaatgcaatttgttcaggaaacattatcactaataatattgatcgcgcaatttggggatctgtaagagaagctgttttctctgataatgttttcaagcaatgccactctgattatcacctttactttattcaagaagacactggaacaaacgatttaattgtaactggaaactcagtttatagtgatgttgaaggaacagctttcattagaactccatcagatatagacagaagacgagtgtcgggtaacgtaggtaatatacctagcttgaacttggattaagaataaaggaacaataaaggtggtggttacgttctagataaaatatagattttattcaaaatacatacttgaaaaacagagataacaagagcatacgtgagataaagagagattgggtttagtccccttctctcttttttgtgctcaaatttaattattaggtggatagatggcaagaaagatatcagattatcatttaaaaaaacgtgaagaaactcaaaagaaatttattgatttattagctcagaataactacattcacatttctggagacatggtaaattcgaaaacaaaggtgaaagtcagatgtcgacataatcacacatggcaagtaaactacgaacactttaaaaaaggtactcgttgtccagaatgcaggataattgaaggctcccttaaaaaaaggcttaacataagtactgtgaaaagtagatatgcccttaaaggctatgagattttaagcacctataaaaactgtcattctaaactaaaagctaagtgccctgaaggacatatatgggagcaccttcccagcaacttctttaaaggtgaagagtgttttcaatgtaaaggtgctaaaaaatacactgttgaatgtgcacaagcagctttttctgatcgtgggtttatccctttattcgatacataccatcacaataaagaaaatctcccttttctatgcaaggaacatatagacttaggagttcaatacgctccacttcataacatggtaagaggtttagcaaactgcagaaagtgttatttacttcttttcacaggcgaaaatagctctagatggaaaggcggtatttcttcgttaaataaaactttaagagaagctgtttatgaagtttggacgaagccctcattagagaaatattcatttaaatgtgcaataacaaactctacaaaagaccttcatgtgcaccactataaaaagaattttagcgagattgttaaagaagcactgagcaatttaagttttgaactctaaaattggcgactttactgtcaatgagcttgagcaaattaaaaatgaatgtgtaagacttcatttaaattatggactcggaatccctctaactaagaaaatccacaatcttttccatgaaatttatggaacatccaacaataatgagattcaattcaacgagtttcgaaatcgctatgaaaatggtgaattcgaggctctttttaattagaaattaaggagatgtttttatgtcagttttcactaatagctacattccagtcaataagtatactagaccaggtttgaaattacagggtgtgaaaaaatgcgtcctacactatacagccaatccgggtgcaggtgcagacaatcatcgaagatacttcagtaatgcacaagtttatgcatcagctcacattttcgtagataaggctgaagcaatttgtatcattccattaaatgaagtagcttaccatgcaaatgatattcagcaaagagatagtgccggaaatccttatcgaggagttgctgcgctgaaacctaacgctaactttctttctattggagttgaaatgtgccttgaaaaagacggttcattccattcagatacagttgaaagaactgaggatgtgttcgttgaattatgtaataagtttggtttagatcctattgatgatattgttcgtcattatgacatcacccataagaattgccctgcaccatgggtatctaacagccaaaaatttgtagactttaaaaatcgagtaaaggcaaaaatgtcaggcaaatctgtttcaaaagcttctccaactaaaccaacaacctcctccccttcctcttcatcagcagtaagtggttcactaaaatcaaaagttgacggacttcgcttctattcaaaaccatcttgggaagataaagatgttgtcggcacagtaaataaaggcatcggatttcctacagttgtagagaaagttaaagttggatctgcctatcaatacaaagttaagaactcaaaaggcactacatattacatcactgcttctgacaaatatgttgatgttacaggatcagttaaaacctcttcctctgccccaaaaacaacatcaacttcttcaagttcctcatctattaaatccgtaggaaaaatcaaaattgtcggtgtatcaagcgctgcaatcgtaatggacaagcctgatcgaaatagttctaaaaatattggcacagttaagcttggaagcactatttcaatttctggttcagttaaaggtaaaaacaattccaatggctactgggaagttatttataaaggtaaacgtggatatatctcgggacagtttggatcaacaatctaattatattcaattttctcggaggatgtttattgatcaatatgtttcagtaaatatccttttctatggtactaaggtggtgaacattttatggaaatggatataacacaatatttaagtacccaggggccatttgctgttttattttgttggctacttttctacgtaatgaaaactagtaaggaaagagagtcgaaactttataatcaaatcgattctcaaaacgaagtactgggtaaattcagtgaaaagtacgatgttgtaattgaaaagctagataaaatcgaacaaaattttaagtaggaggaattcaatgtttgagaatattgataaaggcacaattgttaggactcttttgctcgcaatagctttactcaatcaaataatggtgatgctgggtaaagcagcattcatcattaacgaagaggacataaatcatttatatgattgtttatatacaattttcactatcgtcttcacaaccagtactactaccgcagcatggttcaaaaacaattacataactgcaaaaggaaaaaaacaaaaacaagttctaaaaaaagagaacttgtttaaatagcttttttcggattacctgtgtaaccctccctcttacaaggcgggttacttcttattcaattatatacatgttgattttgttttaatttcttgcttttgataattaatttcagtcctataccaaatatcaatgcaaaacatactgaactcattaagggtaatgtaataaagcctagatactctacttcaatttttgcgcagctgttggttccaatttcacatacgacacttttgctttgtgtaagttggataatataatgataaaacgcaataatcaatccaattgatgaaaggaaaacaacataaaatatcgaattaagatctttttttaataagcctattagtaagataataggtataggatatagaaatattctttgataccaacatagaacacatggtttgaaatgcatgatctcactgtagaataaactagccattgtgccaaagaaagagagaaaaaacagtaataaaaaaaatgattttacatatcttgtattcatacttcaattcctttcaggacgtgttcaatattgtggagtgagttggcaagatattgtttaatttcttttttcatattatcatttttaatttcccctgatatttcttttactctttcccaattttcgagttgaatattaaggcttattaaaattcttttaaagtgatcttttgttgtatttatagcactgtatctctcgtctgtaagagcttcatcaatcatattgcttaaagaagtaagtttattttgcatatctactaacaaaattgcagatctaaagtaatcaacatcaacacatcttggatattcagtttccaatatatccaaatataaagttaagtcaacataattatttctctgcaataataaagtacataatagcactaaagcatctataaaatgtctttgatcattaaattttttatagttgtttattgattttttcagataatcaattgcttcttcatctttatcaagtaaatgtagttctctgccgaaaaagaataaccattttgggttttcgggctccaatcttaacatttcttctgtgagatttatattccttcgtgtttttgattttatattattctctgaaggattatatccattatggtaaaccttaaggttcacaatgaaattaaaaggtagactatgattataattcataggttcttcatgcactttcccatgaaatttaactttaccattgagccgaaacattcttcgtgtatcagaatatagatgtccagtatattcttctatatatggactaactacacaatcaatagaaaaaaactctaaaactctagctactttagctattttccctttgttttctttagagtataaattatctgcatcaataaaataaatccattcggaagtagcatactctataattttatttctagcataggaaaaatcattcttccacttttcatatttaatttcaacatcaggaaaatcacatttaataatatcaacggtatcatcagtggagtatgaatctagaacaataatctcgttaaaatcatctttaacactatttaaacactttttaattctcttgctttcgttataaactataataccgcatgttattgtaggagtatctgatttttcataacctgcaaccaaagattgaattgacatcacatcaatatctttttcatattccattatattaaccaacaatgacaaatctgaatacaataaagaatcggcatagcctttctttaattccaaataaatatcactcagtttcattatctatcaccatttttatcaaagaacttttctatttggcttgcacttctatagccctctaaccgatctttttctttgccatctttgtaatagagaatcgttggagttttattcaaattatatttatctaaaaattcagtgttataattttccttttcttcaatatttaaagcctgtacttttaacttttcttttttaattacttcatttaactcaggttttatttcttgacaaggaggacaacttgtctcataaacataaataaatttaggttttttagagtctacttctttttgatattgagttaaatttatatcattataaaaaggtttttcgctacctgtagaaacataaacgaaaatactaatggctgctgctattaaaacaagaaataaaacaatccactttttcatatagaatactccttattttccgagtagctcgactctataatcctattgtttctgaatactaattttttattgtatttgaagttacttgggtcattatgagttataagaataattaaacaatccatcctgtgtaaggtttcataaatcaattttgtgttatccggatcaatgttagataatgactcatctaaaattaatacttgtggttgatgtaaaattgctcttgctaatgctaaccgttgtttttgtcctgtagatagattggaaccgttttcagacaatttataactgtactgcttgtccaagttacaaatgaattcatggcattgggacattatacacgcgttttcaatttcgttctgatcaaaaatctctcccatgcaaagattctctttaatggttcccttaaaaagaaaaggattttcgtcaatatatacaatcctttttcttattgataaatgatcgtatcgattaatatctaatccatttaaataaattgacttatcgggtactttatacaatttagacaaactttttgcaaacgtactttttccagtaccactttctccaataataaggactttatcctttctgtctaatattaaattaatatcttcaactatataacgcattgggtctgccccaatattaagattaactgttttgatattctgaataaaatcaagttcagttaaattctcattgctatcttgctgaactggatagtttactacgtcaaaaaatcttatggaagcaacatgtgcctgctgaagatctgattgcatactcaatatacgatctagtgaacttagcaaaaaggctgctaatgtgtttataaatagcagtgtacccaaactcattgaatcatttagaacttgtcttgtcccaacccataggataattattgtaaaagagttttgaattaatccttttagtatttcattgctaataactgcctttgctacactaaaggttgaatttaattgtttatcatatgtaagatgaaatttttctaaaaaaaacgaggttttatttaaagaataaacagttgtcatattcttcagaaaattaattaaaagagaggtagatttagccttatcctccatcagtttttgatttttctttttaagatgatcaaaaaacaaaatcgctagacatgaaagtagcaaaatcgggagaataattgttaagaaaagaatgttatttgttctatataaaataactcctaatcccagtattaaaattatatcaattattgcagtaacaaagttagcactaaaaaagtctttaatatatataccatcattgaatcgagaaattacctctccatcttctctgttttcaaaaaaattaataggtaattttgttactttattaaaataaacatttgacatctctttatcaactttgtaagacaattttattatcaaatatgatcttacaaaatcgaagatgcaccttattaagaccatacttatgaatattaaagtgattgtgattaaagattctcttaagcttcttgggataattaggtcaactagaaactttatataaaacgacccagctacagcaagacccacaacgaacaaggaagtcaataaaatcacaaaaacgatcaatttatttctaaaaagtatgtccttaaaaaagtaagaatgttttttttgatctttttctttttcaggaattgactctttgtcaatttctaatataaagtttgtgaatttactttcaaaatcctctttttttattttagttattttgtctttatcaggatcactaacaagtaaatagttatttctaatttcgtatattgttatgtaatgtccatattcctccccttctaacaaagctatacaagggagctttatttgttttagggcttcgaatgtcttattttcttgcaattcaagtggcctagtttttatccccatcttcttaaaaataacaattaagtctcttaaactatagccttccttatccccaattaggtctagtaagaaatcaattccatagttaaggttatgaaactttaaaattgacgagatacaagctagtccacaatcatgactattaaactgtttagtatgaacatatttctttttcttattcaatttcaatccccgctttaaatatgagggaatatttaaaatattccctctacaaatgttttatctgcagaattgacgatagttttgacaagcaacagctccgccaccacaaccaattgtaccgccactagcacattgtagccacaacgcagcacactgagcttttcctaatccactacctttttggttttcgagttcctctagtttaacttctttaaatagcttttccatttgtaaaacctccccatttgtttgcaatccggattacattttttaatataaaggaagataaatctaaattcaaccatattttttatttttttttgaaaattataaggaaacttgttcataaatcatagaaaaaaaactttattacctatcaataaacagaattggttgtaatacactaaataaaattgactattatggatttattttgaattaataatgataaaaatttaggtaaatttttaataattatagatacaaaaaagtaccttctattgtaagaaggtacttttttatgttcaaacactaacccttttatacttttgaataaattgttgagctccatttaaaaaaactagaaaacgcttatttgtagtttcaataacaattctatctggttgagcatatggcataccaattttataatcgatattatctgcaactccatacttgtctgactctttaatactaactatttgattaattggaatttctgttttagataaaccaaattttaagactaagcatttttcatcaaaactataacgtgtatttaggaaaacagtaaaaataaagaaaagtgctaataaaatgattatcataactacatattccatataatcactctttcttatgtttttatataattttaccatgttttttaagtttttaaaacaaaaaaactttaagcgatgtgttatataagtttaaatttatcttaactcttatgcccacctgttaatccagctcgttgaagtgcagttcctgctggtgtataagaaactgctctcagaatcgctttagagccgtatttacttctaatcccatccattacaaaaccgagtttccttctcttttcattatccacttcaaataaactcagctgctgattaacatcatcctcaatattcgataacgtgactgagacacttctcacagtcttacccgagtaaaacttattaaaaagcatcaagcagcatctataaatatccatcgtgatacttgtaggaagatcaattgttttggaacgatgaaaaccaccaccaagctcatccttactgtacccaattcccagactgattgttcgaccaactttattatgtgtacgtgcccttcttgcgacttcttcacaaatctccagaagaaccgccttaatctcttcactccttgtgtaatccctcagtaaaatctgactcttaccgaaactaatctgaccttgcatcaacggagcacctatttctgataaatcaattccgtgagcatggtagtacaactggtttcccattattccgaacttcttttcaagcagctctaaaggaaatttggctaactgacctatagtcgatattcccatccgatttaggtttctttccatcctccctcctatcccccacattttagacaaagggcgaaccttccagagtttatttggtacatcttcatatctccaacgtgcaatgccactctttgttttcttactctccaggtcaagtgcaagcttactgagtagcatattgtctccaataccaactgtgcacatcaaaccaaattctctccacatgctgctttggattgctttggccatttcttcaggatcttcttttcctgcatctaaaaaagattcatcaattgaatacgtatggacacatttctcaggaacaaatctgtaaaacagctttgtaatttcagttgaaactctgatgaaaagcttcatttgtggatttacaatgtgtatccttggatcttcaggtatctcaaatagtctcgatcctgttttgattccaaaatcttttttaagtgcaggagatgcagctaatactacacttccctgtctctccgtattccctacaacagcaagatagcatgttaaagggttaagccccattgttacagccgatacagaagcataaaaggatttcatatcgacacaaagtatattcttacgtggaaattgtgagtaatcaatcattgtatgtaactcctatgatgttattcatgttgatataaactgtattgtcattctggtcttttacgtgaagcttttgttgttcaaaatttatgtaatggactctgccggtgacattttcaacgaatccattgtgaaaaagtttaaattgcaactctttgttaaattcaagtgcctcagagacgagaatatccatctcttcaatttgttgatcatctaaggatggcttttcaatttttgatacatcaatcaaatcttgtttaagctgtgtcaaatgttctggaagcatcattgatgtccatttgattgttcctcgatctctaagcatatcgccccactcctttattgatctaatattaacagaacaaacgttcttcattcaagataaaccagaacaaaagttcgatgtaaatgttggtaataaaatataaaggtcaatgatgatttgcgtagtattaataaaggagggattcttttccatgaaggagagtgtaatggttaatgaagaagaggctaatcggatttttggtcttagttcctgctttgattatgtcaggtattactttaatcgaagcaaataaaaagtcccctttggaagtaattgataatattcgggatgaatttggtatattcagtgtgcaaattggtcaaacagatccggcaattacaattggcatggatcaaaccaaaagtgaagcaaagctccgtgagtatttaaaagataatctgtctagagaagcaaaggaaaaatataagatctatatattaaaagatgatattaataaattggagaaagaacatcgagagtatttgaaagcaaataaccccaataagtaaaatgcccagctctttatttaagctgggcattgttttcattatttaaatagaatttctataagcattaattgcttcatttcgtaatagcatattatctttattaaccatgcctaagttataagcttttttgataacatctaatacctgcgaatccattgtagaaaggtttccgcctgcagtaaatctcaatttccagtcttctaaagacttattcaaatcaagcgtgctttttttattctcgggtttaacgatcgcatttttctcaagtttttcgcaaaactcgttaaaacctattgaagattgctgagtattgttctgtccatacccttctgttgctaagctacaaaaagctaagaattttggatctttagttacatcataattagaagtactaatcacctggttcactctctttcaaaatcaattttttgactgtaaacaaaagtggtgcctgagctcaatgctttaatctgtatagagttatcttgaagtgcgtccatgggaatctcaaaatatttatcccagcctattaccaccttattttgaccaaggatagcatcagatttaaacattttagctgtaccgttatacaacagattcttaccgtctttgcctgtgataactgttaacttggtataacccataaaacgagctttcacatatagtttattccccttcaaaacgtttggcgccttggtttgactagaagtgaggttatcccaagcaaaatcgtttccgtctgatgtaatccctgtaatttgtagatagtagagtggtaatgcttctgccgcttttgcttttgatgaatcagtgaaagcgaaagcaacaactgctagaagagcaagcagtgaatatgtaattctcttcttcatttcctaaatcctccttggtacaagtttacatgttaaatatcgtcatttgaagggaattgtttaatatttgaaataaaaaaagaacctgcattaagcaagttcttttcatattgtcaatttattgtgaatttttaacgacaaggacatttatgtatagtataatatttcctgtacataaagtttgctcactcaagggagtcttgctcatcccctatgaaaggggtgggaaaatgactgtttacgaatcattaatgataatgatcaattttggcggattgatattaaataccgtcttgttgatcttcaatataatgatgattgtaacgtcaagccaaaagaaaaaatagaccttcccttgagtttggacacctgaagggttaggcctacgcagatttgacaacgagcaagccctttgatgggcagcttttgtacagagccagggtgctaccaacaccctggtctttttattttatgcatttaattaaacaaaatgcaaaaaataattatataattgtatcattaccctaattataaccatataaaaatggtatttgcaatactattgcttggtgaataaaaccattattttattggaacccagtactttatcgatgcacaagtgatattatccatgattcagttcaaattcttctcttgtcatcccaaagcaaataccatcataataggcacctttagtgaaaatgatctttcttagttgtccctctttcatgaaacctaatttttcatgtaatcgtatggatggattattaaaagaataaacagttgtatttactttttgataagcaagttccaaaaagaaaaagcgaagaaccatcaagatcatttctttggcaaatcctttgcccctatatggctcgaatacagccaaataataaccgaaggtaccatttttcctatcacagtcaaaggtttcaatcatacctactatattattatcactttcaactgcaataaaacggaattcatctttttctaattgttcttctacccattctctcatgttattagctgaacgaggaaaatgtagcgagtccatatttcgcagaatttcatcatctaacgaatcaaatataacgatatcttcaggttgaattgctcgcagtgtaagattctcccctgtccaataagtaactgccattttaactttccctccagttatttccatacgatttcttaactgcttagtaagtcatcatctaattcaatatacagaattccatcatcttctttatcagcttcaattggttcatcaactaaactgaagacaaactcctcaaacgaattggcaattaagaaaaagtctttgtcgggatgacttaattcatgatcccaaaacaatatctttccattatcgatatccatgcatatttcattcccgcctgcagagcttgcgataggaataatatttctaggaaagcgatcagaatatgtatcgattgctttctgaagactgttatgatcattcgctaaaccataaaaaccttctaacaattgtgtatcatcgcccttgcccatccatggatctttctctaaaggtttatagcaaacgtcatactcaatctcatctgttgtttttttactttctaaataacatcctccatatttcttcaaaaagtccttataatctgaaggtaattgattgcctatgttcatttcaagctctttgagttgttcatttgtattaatgctaggatatctgccagcatcaatcgtaaactctttcaacttttgttcgatcttagtgaagctcattttaataccctccgcattgcacatctttagcaatgaacaattgcaatacttttgtttaatagattattcaatttctatgccatcatatgcatcgcctagtgatacataatcatcccttaaccaataccaatgtttacccttattttcaagcagtcgctgtattaaatctgtaaatgaacttgctatcacctgtgtttcgccgactattccatgtcgatcaaaaaaactgtcatagcattttccttttcgctgatcgtttaagtcaattgttaggtattctccttttccatccgtgcaaacaatataccactcggatgaaatgtcttcttcacagagctccccaacaataatgggattagctaattcaaactcagctggtcgtactatgtatattggataatccgcattttcatataaaactgctccaccacattgttcataaaattcactaatatcttttggtagttgatgcttctcgtctattactgggagaccatcagcttcaaacagccgacagtctgatgtagaagcaatcttcttgattaacatgtcaatgctcaagtccgcacctactttctaaagttgtattgattaaatgcgttataatattgctgtctagcttctttaggaacattagcagcatcaaacatcttctcagtaagttcttgtatttctctgggggatacttctttccagtttactttgccgccaactttcttccctgttttttcgaacaaccattctctatatactttcttggtagcgttgtgttgttccttagttaaagctactgttggtgtgttactccctctactcacataattcggaacattgtgtttagcccatacgtccattacaccgtgatgattctctaaaggactgttacttggtctataatcaacgacatcgaaaggttttacttctttatctgaccctttagcaaaactcattagctgattttttaagttttctccatccactacattgtatggcacgtcccctgccatagcaagatcgtacttagggttataaggcagcaaatctggaatcttgacgtccttaattttcttccctgcttgactagctttatttattaccttgcctgctgcatcagctttgttaatggctcctgcaccttttgttccgataacagctgcagccactgagccaattgcatacgttacccatcttgaccttgaataggcatctccattcaccatatccttttgatatgactcttcaattgcagcagatattgcatcatatgttttaactggatgaataactgcattgccaagcgctgacaatgtttctcctggatcggtgatgaagtcccataagccggttacagtgtctttgccaacgtcatataagcctacccctacaccttttacgatgtcccaggtgatttctcctgctccttctagctgctttgcttgttcaatttgcactgcaagctgtacttgagctggctccagattctcgtaccctactttcttagcaatctctaaatattcatcaggatcagacacaccgtcattaagttttttctttaattccttgatttcacgttcctttgcttcttctttcttcacggttaaataagcttctgaatgctgctcaatatcgccttttttcttatgtatgtcactttctctatacgctttggcgctatagtgaatcggtgtggcgttcttccctttgcctgttgattcctgcagctttttaaaatcttgctggatgaattgttcattttgttcagtctcagcgtactctgtttttaaatcctcatcaagcttgtttatcttatcgattgttttttcacgtttgtcatctgcagaggaaagtttgtctttgaagtcttctgttgagaatatttcaagtggaagaatatcattgatgtcgtttaaaatgtctttcattgcttttttctgttcagacataatggattttgattttgtgtatgcatttacaagttcatgttctaagaaggattcttctatgtatgcatcagacatcttagcgtcttcaagttttgcagaaatgctgcttaagaaaacaattttcatatcgataagatcaatccattgatctgtaacgccgacatggtcatgataaaatgctttaatgttgtctgcacccttacctgaaaacttgctgtcgtctaggtcagctacagctttaaacgcttttttgagcttcaccatttgcgaccttagttccttatactctttggttcttttatccgcttcagagagcaatgaatcagcttcaaataccttcatttcattctcctttcaagcctactctatgtaaattttaccacaatcatttgcttgaataacagaaaaagacagccagaactgactgtcttatacatcacactatcttgttctataataattttctgcggtatagtagcgccaatcccaaaaaggttccccattagccaatatataccggtctaaaaatatttcaaagtttaaatttaatggattatattctaaaccactttcaaatatatagagatagttaggatcaccttgattaattttatctttatcgatcattaaatggcattcttccaataagtagccaattgggataccattgataccttcaaacaaatcctcatattttagttcctcttcaatctcttcaaggctaaatagctgaagtcctccacctatattctccccatcagaaagaatctcaaaaattttcgcaccgttatgtagtgtgatgaacttctgataatcctctggaagggaaagctggtgtttagcctcaaagctttgaatgtcattcagggttgctttgtccggtgaaaatgtaacaaggaactccatgatatcaccttctgaacaaaacaattgaatggctcctttttcatctaaaagacttttcaagccatttaccgtcttatgaacaaagttagtcaaataaatcaccccatatttaaatcaaagggatgtttcggcatctctttttggatttctttctattcatattggtaaaagtaataatgttaacaaatatgattcaaaactggctttcaaaggttcctaaagagttaatgacttattttaaaaacctgattaagtcaatgaataattgggaagaagagatattcaactatttcaattctcccattacaaacgcctatacggaatccttgaattgtttgattaagacaaggagccaatattagccatggttattcatttgaagctcttagagcaaaaatattgtttacacaaggttatcgtaaagtaaaaaagaaattcaaagaagttgaagctactttcggaaaattgtgacctgatcaattcccaaattggggtcaaataggctatgaatgggtttatgaagaaaactatggtgctgacttttccatactgactaaagcaatggaggatggttatttttaaccctctttttacactttttcagattacccattttttatccttggtatgaatttgttacaaactcttttgctttattagcaacagcttcccaagtggccgcagcattatcaagatccgtagaaagcttattgatatcctcattctcaaacccttgtgcgagtgaataaaattgatttgctatagaatgccagtttccttcagtttgttctataaactccagagacctttctgcctggtatattacattatgcaagtctatattgatgccgtgaaacagacttaaaacttttacaactaatgcaacttgtgcatctacaccgtttaaattctgaaaattatcaattcgttgtttaaacatttgaacatcagaatactctaacatttcggatactatatacccgattaaagggcctaactcagagctgaattttactttctcatttatctcatgctcttcaagactttcacccaacaattttttaaattgcatgaatatattcaataaatcatgtatctcgctctcatcattgtattgtgaatctaaataagtcattacttcttcaaaagaattgttcaattgtgtaacacctatgaagttgttacctccttgaagaaaggaatttagtagattttgaacatctttcatagattgttgattttcatcgagctctctcataagtataagacagacctcatgaaaatcttgaatagcatcttgtctatcttgatcattgcttgcagttgtaattgcccttaaacctggttgtaatgcttcgtttatcaattccgaagtggtagacccaacattgtatatatcattagccattttattaacacagcttaataatttctccaaccaccagtcacacaactttttatattcgttataaacatcatataatttctgaaaatcttgaggtatttcaacgtttttcggtaagttcaaataagttttcatctcatcattgctcacaggcaaacccgttccagtaagaatattagcttgagtttttgcccaatatccagtagatattagcccatctcttcctaataaaagatcctgtggtccatattgggatgttgcatctaaaagattatcatatttcatttcttgacccgccctttcatatcatctagagtttatatatttaatataacaaaaaacctaccaaattattttattttttcaattttttattcgataaaaaagtaagacgggaatcattttgtagagcagatcgaaaatgaaaatgcagctaaactaattacaatgacagtcgccagttttatttcatcacaagacaaaatttaaggaataatttaattcacaaaaattggatacaggattataattattgatggtttaccgatataaatagagaacaaacattctaaaaggggaaatgaagttgaagaaagtattattaggttttgcagcattcactttgagcttatcgttggcagcctgcagctcaaatgattctgaaaaagtaagcacagaaaaagaaacaccacaagcgtctacggatgtggaaaagaaaacagaacaaaaggaatctactaaagaaaaaactgctgacaagtctaaggaaaaagacaaaaaggaattggtcgatgttactctagatagagctgttgatggtgacacaattaaagttacctacaacggaaatgtagacacagtacgctacttgctcatagacacacctgaaacaaagaaaccaaattcttgtgttcaaccatatggtgaggatgcgtcaaaacgaaataaagaattggtcaacagtggtaagctgcagcttgaatttgacaaaggtgatcgcagagataaatacggaagactattagcttatgtttatgtggatggcaaatctgttcaggaaacattgctaaaagaaggattggccagagtagcgtatgtatatgagccaaatacgaaatacatagatcaatttaagaaagacgagcaagaagcaaaatcagagaagctttcaatctggagcaagaatggatatgtgactgaccgaggatttaatggctgtgtgaaagagaaaaccactgcagttaaaaaagcaacaacatctaaaccggcagcaacacagcctacaactccaaaggcatcaagtgaaacttcgactacaactgaaaaagaagcttcttcagagacaactggaggaacagaaacatttaaaaattgcacagagttaagaaagaaatatccgaatggagtgcctagctcccaccctgcttaccaatctaaaatggacagggatcatgacaactatgcttgtgaacgatgaaaggagataagtgatgggacaaaaatttcataaattaaactctaagtatggaatcatagattatccaatacttttaaaagatcttgagtccatcattcaagaattccctaaatcagaaagaaagttttatgagtatgcaattaaagctttaaaaaaggaagttgggaaaaaggaaaagattttacatatgacttctgcagatccaaagcttactaaatttggttttatggttatcactgaaaagaaacttctatttgtcactatgaaaggcggttttttcgggggtgcagatactgaagttgttgaatttaaaagtatcaaagaagttgacttcgatattgctccaaatcccttgggaatggccacgatgcaattgggtatcctccatttaaaaatcaaaggtaagcttggaatgagtagcaagcgtaccattagaaatattgatgaacattctcttgataaaatagtagctatactaagagagcaaacaaaataaaaagcccgtttttgggcttttctttttttatatggctaagttaaagataaaggttgatttaatattatggataacggagtttcttatattttatgtagttttaaatggatttctaagtttacttggttatttatgttaaactaaatataaagagattgtaataacttccacttaaattaacgggtcagttagtttaagaagatgaataaaaaaacaacacctttcatcaaggggtcttgctaatttaattgttgcaaacttacagagtatctaataagaggttatagataggagatgaactaaatgaaaaaaatagttgaaagtacaacttttccaagaacaaaacagtctataacagaagatttgaaagctttaggattaaagaaagggatgaccgtacttgtacattcctctttatcttctataggatgggtaaatggtggagctgttgctgtgattcaagcattaatagatgttgttactgaagaaggtaccatcgtgatgccttctcaatccgtggaattatctgacccaaaagaatggggaaaccctcccgtaccagaggagtggtgggatattattagagaaagtatgccagcctataattctaactatacccccactactagagggatggggcaaatagtagagttattcaggtcttatccagaagttaaaagaagtaatcacccaaactactcctttgtagcttggggaaaacataaaaacaaaatccttaatcaacatcctttagaattcggactgggtgaacaatcacctctggggaaactttatatacgggaatcatatgtattattattaggtgctgattttgatagtagtacctgcttccatcttgctgagtacagaattccttatcaaaaaattataaacaggggtgcacctataatagtagaaggtaaaagagtatggaaagaatataaagaacttgaatttagagaagaactatttcaagaagtcggtcaagcgtttgaagcagaacataatatgaaagttggcaaagtgggttctgctaattgccgccttttttcacttacagaagcagtggattttgctgagaaatggtttattaataatgatagtaaaaatataaaaaaatagcttggtctaccaaatgagtttagtaacactttttaaaactatcgggttctttaggtttaaaattgacagttaaatcattgagcttggaaggaaatttttcaagcttatttttagtgtccacctgtttagccttttcactgagaaggcctcccactcttttgatcctcgcttaacaatgggagggcttaactcgttataaaaataagcgctctccccttcggaaatacgcctggctatttattaccttattatcatattagccgatgtaaagcaaaacagagtgtcacgttgactcaaaaattttgtcaaatcatttcatccataataatcatctgaattgtaattaaagtactcaaaagtatcttcaatgactttcttgcagatatcacatacatcccaatgtcccatatcattttgttcggtataaactttggacacttcacaagtgcaatagtctacttctttaaacatgcttatcccccttcgtctttgagattatcataccacgtaatccacgaattaacttatgctttatacaatgcggctcgcctcttcattctttaatttccttcactaagtaaatcactttacaaatccaccaaaaatgcagattcaaagccctttgcaactctctgttgtataaatcaattttatatcccccattcagtgactgcataaataatttcatttgggttaggatcatgatctaaatatccgccatatcgagacactagaaccccatatttaaaattaaagtcaataatccataaatcgctgttatttatttgttcccacagaaaattaaagttctctattatccagttaccgttaatcagaaaaattgggctatcctctatccctaaatataagtaaacttgttcatcaggaagcttagtttgttgcacatgattgatcacttcatattcccaactgtattcttttctatgctcactgtatttaattgcaaaatcatttttatgtaactcaaagttccattttttctgaactttatctaggattctttctaattcaggagatgtgattagactacaatcctcaatagtagttgccatatcacgaggcagtgttgacatcaatgttactcggaggcttttttgtttgtttattttcaacttctgtctaagaagcatttttcgattgtccatactatcctccataaataataatgtaaggttaataaaagaagccagagagtatgtgagggaactctctggcctatagtggttgatacaccaactatgatacatatacaggatactttatatttgtgatgtattcaagcagctttcaggtttaaataaaatgtgaattttatttaaactacttaacgtacacttatttatactgctacttatttattgtcctttatatgctcttccccataaatactcttcattgtttcttcacgttttttctcttcccttttctcttcctctggagatactttctttacttctggtatttccatgtttttaagtttgtcatacaccatagggcgtgaatatcttcctgtgctgccgggaaaatatgcgtctatcaagttgtatttattatccatcaacatttcaaactcatagtaagtatccgcttggtttccagttccttttatttcataagaagattgaatgtaatataaaccatcatcccttttttctaccaaacttttttcataatcagctggaattgttctttctggtactccgaacatttctttaacaagccaggatactttttcatagatatctttatgtgtagtacttgtttgagactttgcagaatatttatctgtttcgcttgcatccaactccttttgcccttcttcacttttatagtactcagtgatctgttcacactcttcttttccgtacacttcaatacaatcatccatatttggagtatccgcgagtttattatcattttcctttacaccttcttcggaggattcctctttagactcatttttatttttagaaccatcatttgaattcgcactactttcagcacacccaccagtgaagaaaataaaagatacacaaactaacattgaaaagcgaatattcataaagccctcctggatttataaagtatttacaatgaatttagatgaactaattataacccatgttcaagaaggtttttcataaaatttcaatcaattcaattccttcaaattattgtattgttttcgtattcaatgtcagataaaatattcttaattaagtttctgttttgacattaaacacaaataaagaggtgctaaatttttggagttaaaaaacattgttaattcttacaacatcacaaatattttagggtatcttagacgttctcgtcaggacatggaacgagaaaaaagaacaggtgaagacacactcacagaacaaaaagaacttatgaataaaatacttacggccattgagatcccttatgaattaaaaatggagattggatcaggagaaagcattgatggtcgacctgttttcaaagaatgtcttaaagatcttgaggaaggcaaatatcaggcaattgctgttaaagaaataacaagacttagtcgtgggagttatagcgatgcaggacaaattgttaacctccttcaaagcaaacgattgatcataattacaccatataaggtttatgaccctagaaaccctgttgacatgcgccagatacgttttgagttatttatggctagagaagaatttgaaatgactagggagcgtatgacaggcgctaaatacacttatgcagcacagggaaaatggatatctggactggcaccttatggataccaattaaacaaaaagacgtctaaactagatccagttgaggatgaagcaaaagtagttcaattaatttttaacatctttctaaatgggttgaatggaaaagattatagctatacagcaattgcttcacatctaacaaatttacaaatccctacaccgtcagggaaaaaacgttggaatcaatacacaatcaaagcaattctccaaaatgaagtttatataggaactgttaaatataaggttagagaaaaaacaaaagacggaaagagaacaattagacctgaaaaagaacaaattgtagtacaagatgcgcatgctcctataattgacaaagaacaatttcaacaatcacaagtaaaaatcgcaaacaaagttccccttttgccaaataaagatgaatttgaattaagtgaactggccggtgtttgtacttgctcaaaatgtggtgagcctttatctaaatacgaatctaaacgcatacgaaaaaacaaagatggaactgaaagcgtttatcacgttaaatcgctcacatgtaagaaaaataagtgtacgtatgtgagatataacgatgttgaaaatgcaattctggattacctctcttccttaaatgacttaaatgatagtactttaacaaaacacatcaattcgatgctttcaaagtacgaagacgacaacagtaacatgaaaacaaaaaagcaaatgtctgaacacctttcacaaaaagagaaagagctaaaaaacaaagagaacttcatcttcgataaatatgaaagtggcatttacagtgatgaactttttttgaagagaaaagctgcattagatgaagaatttaaagagctccagaatgcaaagaatgagctcaatggattacaagatacacaatcagaaatagacagtaatacagtgagaaacaacataaataaaataattgaccagtatcacattgaatcaagctcagagaaaaagaacgagctattaaggatggtcttaaaagatgttattgttaacatgacacaaaaaagaaaagggcctataccagctcaatttgaaataacccctatcctaaggtttaatttcatttttgacctcacagccactaatagtttccactaagaaaagtagtaagtatcttaaaaaacagataaagctgtatctcctgtgaacacaatgggtgccaccaagctgttatctgaaaagctgtttcatcaagcaaaccgccacgtccaaaacaaaggaaccttgttttgttcggtccgctttggaaatgttctcggttccagaggttcggtcatccccatattatttgaacagatgatggagggtgaacctctgaccatcacagacaaaaacatgaccagatttttcatgtcaatagacgatgcagctacattgacattacaatcggctgctattacaaaaggcggagaaacctttattttcaaaatggaatcactgaaacttgaagaactgattcatgggtttgaagaatatgcatcgcagcacgggctcccgcggccggctgcagtagaagtgggcaagcgtccaggtgaaaagcttcacgaagaattaacatctccacatgaaattgaatcactgtatgaatggggcaacctttatgcgatccttccagagccggaaaaacatcctgactttcgcaaagtcaatctgcctgggtatcaatcagatcaagccccgctcattacgaaagaaagaattgctcagattattgaagaattgcatcaagagaaaaaggcataaaaacaagcctgtctatccattaggcaggcctgtttttaacagtttatttattaaagagatgcagatagctttcgtatccttcttcttttagcttatgcttcggaacaaaccgcagcgctgctgaatttatgcagtaacgaagtccgtttggccccggtccgtcattaaatacgtggccaagatgagaatcagcagttcggcttcttacttctgtgcgaatcatgccgtggctcgtgtccagtttttcttccacttcttcttcaatcggctttgtaaagcttggccagccgcattgggaatcaaatttatctttggatgtaaacaatggcttgcctgacacaatgtctacatacaacccttcttccttatgatcccaatattcattttgaaatggcggctccgtgccgttattttgcgttacttcatattgcatgcgatttaatgactttattttttcttctttattgtacgccatttatttagccccccaatgctcgctgataaatcccgctcgtccggaacctgtccggtagcgctgataatgtgctggattctttttataaaaatgctgatggtagccttccgcttcatagaaaggttcagcttttaaaatgtccgttacaatcggatctttaaagatgccgctttccgccagacgttgcttggaagcttccgcaagctccttttgtttatcattatgataaaaaatggctgcgcgataggaactgccgcgatcagcaaattgccctccggcatctgtcggatcgatttgctgccaaaataattcaagcagtttttcataagggaatacatcaggatgaaacgtgatttgaacggcttcacgatgtcccgtcgtttcactgcacacctcttcgtacgtagggttttcagtatggccgcctgtatacccggacaccactttttcaattcccggctgttcgtcaaaaggtttaaccatacaccaaaaacagcctcctgcaaatgtggcgatttcttttttttcagacatactggtgcctcctttgttaatacgtggtattattatattatagcatgtaaaaatagaatgaaaatgattctgcttttcaataaaatctataggttttaagcaatatgcttatgtaatggaggttcacaaatttgaaagtaagaacacagatgatgtacgatatggaaactttactccgtaaagtctttaaacaaatacgcaatgaaatcaatgaaattttagataaagagctgtcgcggaatgaattcaccattcttcgaatccttagtgaacaagggcctaaaaaagtcactgaatttgcgcctattttagaggtatcggcaagccacattacggctgtgaccgatgcgctggtagaaaaggaatggattacgagaatcagatcgaaggaagacagacgcatcatccgcattcatatcactgaagcgggcgaaaaagtccttcagcactttaacgagaaaaaaacggaatatttctttaaacgctttgactgctacactgatgctgaacttgccacgttaatcgagctcttcagcaaacttgataaaaaacggtgaaaaaaagcacataccgatatataggtatgtgcttttcgcagtgcttcacttatttttcagtaaacagcttcattgctttccagcggccatatctataatacaaaaatgccgcgcagctgctaaataaaaaactcattccgattccaagcccgattcctttttgtccaagccaagctgaaaatagagctgtgaaaggatacctcaacacccaaaacgagatcaaatttaataccagaacctgcagcatcgctcccgcggccctgacgattccgttcagcacaaaattaaccccaataaaagggtagaaaaacgcgatccacttcaaatattgttcaccaaatgcgaccgcatcaggctcactgataaataaccttatgaggtatttaccaaatacccaaatcataaccgcaatcaccagcatgcaggaaataacagctatcacacctagccttgcaattgttcccactcttttttcgtttccgattccaatattttgccctgccatactattgacggccgtaccggcagccattgctggaagcgtgatgatgctatcaagccgctgcaccgcgccaaagcctgataccacgtgatccccgtatgagttaacaacactcataatcgccatcataccgcctgtaatcaccatcatctgcagacctgccggaatcccgagtttcaaaatcagcgcggactcttcccacttgggcattctcggaatcgagaatggcacaagcttgtgtttgatgacataaaacaacccatacaaaaacgcaatgccctgtgacaaaatcgttgaataagccgctcccgctattcccatgcggaacacagaaataaagagcggcgcaagcactgtattcagtacaacagcaaacgcaataaaccggagaggtgtcttgctgtcgcccagcgcacgaagcacagtactgataaagttataaccaaacaaaaataaaatgccgataaattgaatctgtaaatacgtctcagcaagcggtatcattgactccggcgtttttagaagacgcagcaaaagctctgagagaaaaaaaccggccgcgccgaatccgatgcttaggcctgttaataaaacaacaaaagcgttaatatacgacgccattccttttatatcatcttttcctttttgctgagataaaatggttaacgtcgcattgttaaggcccaaaataaaagacagcacggtcaaaacaatcgtgcttgataccgcggctgccccaagggcctttgcccccagtaaattgccgatccacaagctgtctataaattgaaaggaaacctgcaatgcgtttccgagcataataggcattgaaaacagtacaagctgtttcagcacgttcccctgtgtaaaatcgtatgctttcatcttttctccttgtgttctcaaattttcttcggaccacacgaaaaaagagacgttgtttcatgtctcttttttcatgacttatcggttttttttcggtctcgcataccgaatgtaaacaccatcacacttaggaacaaggcacaataggaaacattcaaatacatttgatccatatcttcagcagccagatgatgataagcaagccagccgaagtacagggaaaatgtaaaggataataaactgaaatactggtaaatccgtttcattttcagtcacctctattgtttaggatggtaataggaaaactcaatttcatctttttctaaatttatcttatccgctttgacatacattccattcgttaaaggcatttctgacaaacgcacttcaatgcttttatctccggggtgaacatggacaaatgacggcaattcataaaagctgtccatataatttaacacaaagctaattggtatactcaatttccctaacgaaaatttcgtgacattcagctctacatcaccgttttttttcacggtcggctcaaaagcgataaacgcatcaatagacgtggaaaatgccttgattttccctgcgacatgaacatcatcatcaatctctactttataatcaagcttgtttgatgctttgtcgtttaaatatgagttaacaaacgcagctaatgattcttttgtgcttgtcacttgaaatccatactcgctctcagatgcatctttcacctgagcctgttcccccggaagcaaaacaagtgccacaaacccggcggcgaggataaaattgattgcaagcaatataaaaaacagtcgcttccacttattcatgctgtcaccctactctttcggtaatccttcttttttaatggcttgatagacgcgctttgcgataagagaataacccgtaccattaggatgaaaatcatcttcctcagaaattcggctgctgtcacttttttgattaaacaaatcttcgatatggacgatttttgcatgtttatcttttttcagctctttttcagcaatatggttccaatccgtgacgacaccatttatttcatttagttctgataatgtaaacgtaaacggattgtacatgctgacataaatcagctcagcgtgatcattcagctcgcgaatttcagaaatgattttttcaaagcgcttttcgtacggtttttccgcttcctgaaacggttcaacggttaattgcagaaagttttggcgaaggattttcatcaaatcattaccgccaattgtaaaaaagacataatctgcgtcctttatgcctttttgaacctttttatcttttagtttttctaataaatcatccgaacggttcccttttacagcataatttttcacgtcgaccgttttgacttgtttatctgaccggatagaatccgccaccttgccgacatatccctttccgtcgggatctccgactccttctgtcagcgaatctccgacagccgctatgacaatgtgttcttttgttttcgtttcatgggctttttgttttccctcagatgatgtacgtatgctcgtacacgcagtaagaagcaaaatcaaactggccatgattgaaaaaatgcgcagcttcaatcttgttgctccttcccattctactagtggaaagtgtatcatgttttagaagatttgcaaatgcctagtctcttagcttacttgagtgtactggctgacttcacatcggaaatgatatcatcgtacggtgtattctccactccattgtaatctttcagcaccttaccgtccggacctaccaaataaaaagaagattgatgaatcacttggtcctctccctccggcttctttacgatcgctttaaagctcttaagtgcgaactcctcaatctcactctggctgtatcccgtgagaaaatcccagttatcaaaagataatggataatttgcggcaaatttcttcagctgtttcggcttatcgttttctggatcaacactaaatgatatgatgcggacatctatattttcggctttcagttttttttgcagatcggtcatatgagcggtcattggcggacatatagtttcacaattggtaaaaataaaatccgccagccatacttctccttttaaactctctaaagaaacgttcttgccgtcttggttttgaaatgtaaaaggctccacctcgtaattgagcggatctttaatctgctgtcctccgcatgcacacaaaaacagaaaaatcagcccagccgttaaccccttgataaccttcatgacatccatcctttccagccagcataaaaacgctttctaaaaccgtccttactgtcccatgtttgtattcgatactgagcaaaaaaaatcctgcatgcctccccattaacgattacaaaggagggcatgcaggtaaaaaacggcatgttacgcgttgtgctttaacacctcttgatgaaatacagcctgataatctgcccacttcatccgccgcttcatataatgtcggaaagaatacacttttgccctgctgtttgatgaaaacacttcttttaagtagaattgcaaatggtgatgtaacataaagaaatagtgctcatcttcctttaatacaggtatttctgtcactttcacctgaatcccgtcaccgcgtttgaactctaggcttttgagtaacaagctatcaatcctcttttttgtttttcttctattatatatgatgccagccgggctgtctgtcattttgcgcggttgtgtaaaaaaattagattagcaaatggaacaagtcctcatccttgttcacctctacataatgaaacggttttttgttcatccgttcaatcagcggcccataatcggctttgttctgcagctcgatgccgacaagagcaggtccattgcttttattatttttcttcgtatattcaaaccttgtaatgtcatcattcggcccgaggacttcgtcaagaaattcgcggagcgcccccgctctttgtggaaaattgacgataaaataatgctgaaggccttcaaaaatcaaggaacgctccttcatttcctgcattcttccgatatcgttattgcccccgcttaccacacacaccacgtttttccctttaatttgatccttgtacaaatcaagcgctgcgacagaaagagctccagccggttcagcaacaaccgcacattcgttatataattcaagaatggatgtacatacttttccttcaggcacaaggagaatgtcatcaacgacagtttccagcgtccggaaggtttcctcgccaatttttttaacagccgccccatctacaaacttatcaattttatcaagtgtgacgacatgcccagctttgtttgattcaaagtaggatgccgctcccgccggctcaacagcaattacctttgtatcaggagacacgtttttcaaatatgtacctaccccagagagaaggccgccgcctccgacacttgcaaaaagaaaatgcggttctgtatcaatgtcgtttaaaatctcgactgcgagcgttccctgtccggccatcacatccggatcatcgaacggatggataaacgtccgagattccgcctcacagcattcagcagcgcttttatacgcgtcgtcaaacgtatcgcctgtcaaaataatatcgataaatccttttccgaatagttcaacttgagatactttttgtctcggtgtagtagacggcataaaaattttcccgtgaatgccaagatgtttacacgaaaatgccacaccttgagcgtggtttccggcacttgcacacacaactccgttctctgtctgctcgctggaaagctgtttcattttatgataagcccctctgagcttaaaagatctgacaacttgcaagtcttcgcgttttaaatagatattgcattcatatctctcagaaagtctgtcattcctctgcaaaggtgtgtgaatgacaacgtcctttacgttttggtgagccttcaaaatgtctttcacttggatgagagagttttctttaagcaacggtttcatgtacagattcctttcttgttttaaatccctatttaatatgccattataacatgaatattcaaaaaataagacaattatttttatttaataattaaaaaaatacagactatgtccaccacatcttgtggtaacttctgttcaaccattatcctgcagagccaagaaaaaagatgatcgtaaaataaagggtgttttcaaccaaaaggcatgatataatgaaaccaattagaaccaaaaggagccaattgatgaatagtgcaccaaaactcaatacatttcaacatctaatcggagaacatcaaacttttctggaagcgaagcgaatcgccaagcagttctcgttatcggagcttcctgtcttaataacaggaaaaatcggaacaggcaaaaatcacttcgcacatgccatacacttggaatcttcgagaagcaatgaaccgtttataagcgtcaattgcagcacccattcggaagaaacccttattcatgagctttttggccctaacggaaacacaggtgtttttcaaaaagcggtacgaggaaccctttttcttgatgatgtatggcgcatgcctgcttctgtacaagctcagctgttaaaagcgcttgattcagacacggagaaaccgcgaatgatctgtgcttctgcagaccgatccgtggaacatacattcaggcaagacttattctacagactgaacattttaacgctcacactgcccgaattatcggaacgaaaaagcgatattccgcttttgacacagcattttctctcaaattctggtcagcaattgttaatcgatccctccgtttttcccgtgcttgagaagcatgcatttgaaggcaatgtcagggaattaaaaaacgctgcagattatatggcggcagtatcaagcgggggaacgattcagccatatgacctgccgccgtatattagaggcacgatagacggaaaaacgtcgaagaaaaaagcgaaactgcttactttaatggaaaaagctgagtttttgtttattttggaaacaataaaagtattgaacgaaaaaggagaacctgccagcagacggatcatttctgaacacagcaaaaatacccaaacctcgttaactcctcagcaggtcagaagccgtctcgactatttggagaaaaaagattatgtcaccaaaagccgcggacgcgcaggcacaaaaattacctttgagggcttgagctttatagagacgttaaaaaatcaaatgatctagcgatcgaaaggagaatgtacttgtttacaatcaaagaagagatcgccaatgcgattacacacggcatcggtgtcctcttatccatcccagcattagtgtttctaatcatatttgcggctaattacgggtctgcatgggacattgtcagctttacaatattcggtgtctctatgctgctgttatatttgagctccaccctgcttcacagcatcacacataaaaaaacgaaggacattttggagattattgatcatagcgcaatttacgtactcatcgccggaacctacacgccttttttgcttgggccgctgaaaggcacactcggctttaccctgttggttatcgtatggtcacttgccctaggcggaatcgtttttaaaattttctttgtgaaacggtttatcctattgtcaaccttcgtgtatttagtcatggggtggctgatgattattgcagttaaacctttatatgcttcactgagcggagcgggattcagcctcctttttctcggcggcattttatactctgtcggaaccatcttttacatttggaaaaagatccccttccatcacgccatttggcacagctttgtattgggcgggagcgctgccatgtttttctgcgtgctcttctattgtgtaaaggtgcctttcctttcgtaacagtaacagaaaagcgcagtcttcacgactgcgcttttttatgcacgtaattgtttttcattggcaggtatataagcttttgaaaaggacaattcaatgtctgccggttttaagcgtttaaaaaacgagccattttgcatgttatctgttcctttcgtttccaccatcaccaacggaagatgatagcgggccgcaagttctacaggatcaatagaaccatctagtgaaagaatcaggctttgtcccttttccagctgttttgtcacatcttcatataccttttctgaatccccgtctgaaatcacatccatccgatccagccattgcccgataaaaggcaagcggaacacttttgggttagcgataaagccggccggttcctcaatatatccagcaattaaggccagttcagccaaacgcaaacggggatgcacatacaaaacaggaccgtgtggtattggctctggctgatggatcgtcacaactgaaccggagatgccgatacagccttctaaaaacgcctttggctgttcgtacacaagagccatctgttttttgtatgacagacggggatcgagcattgtttgattaaataattgtttcatattttttaacagcatatacacaatataaaccactagaaggctgtagcgaaccaattaaaatcctcccgctttagaagaattctttttttcatacattagaaattcgtaatcatacgggtttttttcgtctttggtcccctgctcagaagaaaccagcttccaattggattcatcaaattcaggaaagtgacggtcaccctcaaactcgtgatgaattttcgtcatatacagtctgtccgcataagggaacaggtccgtatagagctgagcccctccgatcacaaagcattcttcagggcctgaacaaatgtccagtacatcctttaatgaactgacaaccgtgcatccctgaaattctgaatccggcgctgaggtaacgacaatatttttccgatttggaagcggacgtccgatcgattcaaatgttttccggcccataatgattgaatggcccgatgttattttcttaaagtatgcaagatcattgggcaaatgccacggcaaatcattgtctttgccgataagcctgttggcatccatcgcaaaaatgaatgaaatcatacgctgaccgccccttttatatgaggatgcggatcataatcctcgatgataaagtcctcaaatgcaaagttaaaaatagaatcaacctttctggcgaaacgaagctgcggaagcggtctaacatctctttccagctgcaaattgacttgttcaatatgattttggtaaatatgaacatcaccaaacgtatggatgaactcgcccggttcaagcccagtcacatgagcaatgatcatggttaggagggcataagatgcaatattaaacggcacacctaagaaaacatcggcagagcgctgatacagctgacaggacagcttgccgtcagacacatagaattggaacaggcaatggcacggcggcaacgccattttatcaatttcaccaacattccaggcgctgacgattaagcgtctggagttcggatttgttttaatatcttcaataagacgggaaatttgatcaatggtttctccatcagctccccgccaagaacgccattgggagccatatacaggtccaagttcaccgttttcatcagcccactcattccagattcgcactccgttttcctgcagatagcgtacattcgtatctccttttaagaaccacagcagttcatgcgcaattgatttaaagtggagttttttagtggtgagcatcggaaagccttcccgtaaattaaatctcatttgatatccgaaagtgctgattgttccggtcccagtccggtctccctttttctcaccatgctctaaaacatgtctgcagaaatccttatactgtttcatttttttcatcctttaaaagtagtcttctagtagtgtaacacaataaaaaatcatttctgaacccagaaatgatttttttatagtcagctgacgacaggcttttcatcctgttctttttcttcatcttgcagatcctgatgcgtatgtgcaattctgctcgccgctgctgcagcaagagctgccacaatatcatccaaaaaggtgtgaataccgtctggactttcatcaagttccttaataattccaatcttctctttatccaaataaccgaaattggtcaaaccgatcgacccgtacacattaacgattgaaagcgggataatttcatctatgccgtaaagcggttcatccgtttcaacaaggtgctgcagcggttcggggagaagtttctgttctgcaagctgatcgagtgcaaggcctgtcaaaacagcatgaataatttcacgtttgttcaggactttttctacattctccatgcaaacactgagcggcagatttggattgtatttttcctgaagtttttgaacaatccgtgcaatatcttctatcataacgccccgtttgttcagcatatcctttgttatatcgaccatttcattcattgtgtactttttcatgtctaatggcatctcctttaggcactcatccagttgggaggcgtgttgcggtcccagtaaatgctcccaagctcatgatgtgattgaaatccatcttctgctgtatgataatgaaaattaaaccagtagccgtcatgaggcgggtggtctcttcgcacatggaatctgagaagatcttctccagttgtccgattgtaaacgttgaaaattttttccgttttgcccgctgaaggcatgcttgagatcacaacatcttggtacgcctcatcatcttgcaatgtcgctaaataatcactaatcacattttcgatttttggcaggatctctttccgatagtcatcctcaatgacaggagcgattctgctgccgaattttaaaaaggactgatcctcagcgctgtcaaggagctgttccttgtacgattgaaaaagcagttcaggatctcgcctgtcatccgactcatcatcgtacaggtcatgctcatcataaaaagcggtgtaatcattctgctcaagactgctcggctgtccggaaggcttgtccgccataagggcagccggaggagatacgagcccgaacgttacaatggtaaataaaaccacaagggtctttctcatccacaatttcatgactgcttattcctctctattttattgtcatgtttctcttattttagcacatccaaaacatgcaagtcatgtactatatgaaactgatatgcaaattaggagattcgttgctatgcactttgtgtaaaaacgcttacaatatttcatgaaaggaggctttccgcatgattgacgctctgtttgccacagtttcactcttaacattattatactttgtcgtcatggaggtcaccgattaacagaaagcccgtgatatgaatcacgggcttgtttgaatgacgccataatggaacagtgctgtttttcttttcatgacgttaaaaccaaactgttcaaaccgcgggcttttccagtggtcttttagcacaacgctttttctggcgactcgtaccgcttcattgatacatccttcgtgcaaaacggaatcctctgccaaatcacgtaaaggcgcgatgccgtcagaggtttctacaggttcatgaaacattggatcgaaataaaccacatcaacagagttgtcagggagctgcttgatgtgttcaaagcaatcaccattcttcacctggattcttctcatcgcagcttgaagctcttctatacccgtttcccatgaatgcagccccgtcctcactaaaacagacacaagatggtttttttcaatcccaacaacagaacccgtttcgcctactgccatacttgcgataatggcatctgaccccaacccgagtgtgcaatctaaaaacgtatccccttcagataagccggcagcccgaagcataggttctttctccccctgtaagaagcgtttggctctgaacatcgctgtattcggatgaaaaaagaatttggcaccttgtttcgtatacagctcaaaccgctctttgccgaccacaagcaaatcacgttcagctgatttcagcaggtgctcaaccgtttgtttattccggccgcagtatggcatatttagctctttagaaagctgctttgcagtttttatggtgtgttcagacggtctatagcttgttgttatcatcttctgtactcccaaaaagaaaatgcccggagaacgggcatttagcagtgcgcatcgaaggcagcagtcagatttttcatgatttcttccatatcgtgtccttcaatttcatgacgcggaataaaatgtacgacttctttgcctttcaaaagagccattgatggtgaagaaggctcctggccagtaaaatactcacgcattttcgcagtagcttctttatcttggcccgcaaatacagtcaccgtattgtcaggtgttttgtcattctggaggactgcctgtgtagccgcaggacgcgcaaggcctgccgcgcagccgcatacagagttaacgactacaagagttgtgccctctgccttttccataaagttttctacttcttccgctgttgttaactcttcaaaacctgctccagtcagctcgcggcgcatcggtacgacaagctggcgcatgtattcttcataagccattgacataaaaaaagccccctctagtatccttcatctgaagtaaaggatactatagagagggccggatttcaaatgttcacgccttaaaataaaagaaagtgtccccagctatctagattttcataataccgccggtgttggcacttgtcacaagtttagaataacgtgccaggtagccggttttcactttcggttcaaaacctttccagttcgcttttcgtttttcccactcttcttctggcacttgtacatccaagatgcgtttttcaatatcaacgataatatggtctccgttttcaacaaaggcaagcggcccgccctcagcggcctcaggtgatacgtggccgattgagaggccacgggaggctccggaaaaacgtccgtccgtaatcaatgccacttttggcccgagtcccattccaacgatttgggatgttggcgccagcatttccggcatgccaggtccgccttttggcccttcgtatctgatgatgacaacgtcgccttcttttacttttcggttgataatgccgtcaagcgcctcgtcctgagaatcgaatacgacagccggcccttcgtgtcttgtaatcccattctgtacgccgcctgttttaatgatagcgccgtccggagctagattaccgaataaaacagcaaggcctcccttttcagtgaatggttgatccagcgggtgaatgacgtcataatcctttacttcatgtccggcaatggtttctccaagagtttttcctgtaacagtcagcgcatctaaatgaagcgctccttctttcttcgaaagctcattcagagccgctgaaacgccgcccgcttcgtgaagatcttcaataaacacatccgatgcaggcgccagcttagccaagtgcggcacgcgctcagcgacttcgttaatgcgttctaaagagtattcaacgccggcttcgtttgcaagggcaagggtatgaagaacggtatttgtagaacctccgagcgccatatcgagtgcaaacgcgttatcaatcgcttttactgtaacaatatcacgcggtttgatatctttgcgaatcgtttccattaattgcgcagccgattttctcacaaactctttgcgttccggagatgttgccagaatggttccattacccggcaaagcaagaccaagtgcttctgacagacagttcattgagttcgccgtaaacatgcctgagcaagacccgcacgttgggcatccgaactgctctagttcttgaagctcgttttcgttgattttccctgcttggtaggcgcctaccccttcgaatactgaggaaagggagatttttcgcccgtcacttgttcttcctgccgccatcggtccgccgctgacaaaaatcgtcggaatgttgatgcgcattgccgccataagcattcccggtgtgattttgtcgcagttcggaatacagaccattccgtcaaaccagtgtgcggatacaaccgtttccacagagtctgcgataatttcacggcttggcagcgaatatctcataccgatatgccccattgcgatgccatcatctaccccaatggtattaaattcaaacggaacgccccctgcttctctgattgcttcttttacgattttcccaaactcctgcaagtgaacatgaccgggaacgatatcaatgtatgaattacacaccgcaataaacggcttgccgaaatcctcttcttttacccctgctgcacgaagcaaactgcggtgcggagctctatcgattccttgtgtgatcatattactgcgtaattctgccatggtgatcctcctaaattctttcaattgtttgattggattttattttgacaattttcagtttatttatgggctgtttttgcaaataagataaatacaggccgccctcaccttgttttgttctttcgtgtttttatatttatatagctttctttcgatttgaaccctccaactattaatattgttacttactataaatagttttcggatatttttcaacaatattcgaaataatttttataaaaagtgaattcacataaaaaaggtgcatgatctgcaccttttttatctttattcgcctttttttctgctttccgtcatttgtttccaaacagaaccttttgcttcttctccatgctcaatacgttcaagcgccattttgacttgaaggctgacctcaaattcggggtcatcttcggcagcgcgcaaagcttcaattgcactttcatcgccgacttcgtacaggaacatggcggcacgccagcgaacaagcttgctggagtcgcttaatgacttgatcatagcaggaatggcttgaggatcgccgatatcagacaggcagtctccggccgttcttctgactgatacagctttgtcctcaagtgctttatacaatagaggaagaacatcaggtgtttcaatcattcctaagtacacaacagcctgtcttctgatggacacctttggatcatccaatgccttctgtaaaaccgggatatcctcttctttcggatccatctgttccaagtgtgcataacgctttttccagtcctcatcatccagcatatcaagcgttactttatacgctttgcgctgtacagcttgttttgcttcgccctttccttgagcggctgcttcagtcagtcgtttcagccgttcatcactgtatgccgcttgaagctcttctgtcacatcatggccgatttcatcaaagtcaccgaatctgacaccttgttctttccaagcccgctcaaacacaacattggaagcttcagatctaagttttaagatcgcctgctgaaagcgttcaggtaagccgaagcgttcttcccgctctccatcggttaatttaacttgcataggaatgccgctgaacatctgcacaaaaacttttacctctccaaaagattcttgatcagaacgattttcttctgcgctttcagcactttccatcccaaatgcagtgcggacttgcggtaaaatgtctttccagtcgtatcttgcattccgttcaacagcaagaaaatctgcgacgtgatatacccctttaactccatctattttaaggatttccgctataacaagcggtgcgccttctgcttgctcaggtttatagttattgcttttgcccgccggaagctcttccgttaagatgactttcattgtattcgggcttggtgtaggttcaattgattttatcttcatgatcgtcctcctatagcatatctgtgacttattctatcatagtcgctccaagccttctattacgacgtttcggcatcaatcccgggtatgtctttttctaattggcggacaaattgaagcataaaattgtgtctttcttctgccagttcccgtgcagtgtctgtattcatcatatctttcagccgcagcagcttatgaaaaaaatgagcgtaggcgctttgctcatctccataaaggccatgcccttttgcgcccgcaaacatgaaagctctcgcaatgccgacagcaccaatcgcatcaagtctgtcagcatcctgtacagcttttccttcaattgagagcggctccttcgccaatttccccctgtcccgaaaggacatccttgttataatatgaatcaccctgtcagcattctcttttcctactccgaaaaaaacgagctgatcatatacttcgctcacagaaagcctgaccgtgtcaggcagcttcacatcaattaaatcatgaaccaaagccgccgtttcaacaatgaacaaatccgctttttccttttctccaatatacgctgcaagatctgctactcttgatacatgatgccagtcatgtccagagctttcgtcagtcaggatagattgaacccatgtcctgatttgctctgcctgcttcaattccttcacaaaaacaccctctttttattgctctaatagcttcacgatatcgtcttccaactctttcggatttgtatttggtgaataacggccaacgatttctccatttctatccactataaatttcgtgaaattccacttgatcgccttagttcccagcatccctttcgcatgttctgtcaaatacacaaacagcgggtgggcgtttttcccgtttacatccacttttgaaaacataggaaatgtaacaccgtaatttgtttcacaaaattcctgtatgtcagcctcttcaccaggctcttggttcatgaattgattgcaggggaaccctaagatctccagcccctcctgctgatatgtatcatataattcctgcagctgcttcaattgggaagtaaaaccgcacttacttgctgtattcacgatcatcagtacctttcccgcgaaaggctgaagtgtcatgtctttccctgtgattgtacgtaccttcatatgataaatagacatgtaagtccctcctatgtccttggtgctgattattttaccttttttaaatcgcaattcaaaatgtaaacatcaattaagaactcataagaaacctaacgatatgagcgtcagttcattatcaattcatatggctcgttttttatcttatcattctataaaacattacaattccctcttacatctttgaaaatcattttactgtgaaaccaaaaggcgtgtcagtgcgttttatttaaagagttttctgttgtttccccctcaacacgtatagatagattgaaaattggcgtgaaaattcctataatgaagaaaattaaacggggaaataatggaggtggcacgttgcctattaatataccaacacacctgccggcaaaacaggtgcttgaaagtgaacatatatttgtaatggatgaaagcagagcatttcatcaggatatccggccgcaaaaaattattatattaaatttgatgccgaaaaaaatccaaacagagactcagcttctcagattgcttggaaattcgcctttacaggttcatttcacatttttaatcccaagcacacacacgccgaaaaatactgcgagagaacaccttgacgaattttacacgactttttccaatatccgtcacaagaggtttgacggcatgattatcaccggtgcgccgatcgagcatttggcgtttgaagaggtttcatattgggaagagctcaaggaaatcatggagtggagcaaaacaaatgtcacttcaaccttgcatatttgctggggtgctcaagcaggtttgtattaccattacggtgtggaaaaaattcaaatgccgaaaaaaatcttcggtgtgttcgaacataccgttctttcaaaacacgaaagattggtaagaggttttgacgagctatactacgtgccgcattcccggcatacagatataaatatggaacagcttcaagcagtgcccgagttaaacattcttaccgcatcaaaggaagccggggtttgcttaattgtgtctaaagacgaaaaacaagtctttttgacagggcaccctgaatatgatacaaatacgcttcttcaagagtatgaaagagatttggaacgaaacctttctactgtcgaggcccctaaacattattttgcaaaaggcagcaacgagccagtgaatcgctggaaagcgcatgccacattattgtttatgaattggctgaattattacgtttaccaagaaactccttatgaatgggactaatttttctttttttagtgatacgctgagcaaaaaatatgataaaatacatctgattcagtctgcgtataacaaaaatttaaaatactggaatccaaatcatttaaaattagcttaactttttcactgcattaataattcgattatgtatttgtgttatgtttatgtatagacaataactccttacgatgcatgaagcttgcttgttgttgattacattgaggtgaatttacttgaataccaataaaagagtattaattttgactgcaaattacggaaatggacatgtgcaggtagccaaaacactttatgaacaatgtgtacggctcggctttcagcatgtaacagtttctaatttgtaccaagagtcaaatccgattgtttcagaggtaactcaatacctttatttaaaaagcttctcaatcgggaaacagttttatcgtttgttttattacggagttgacaaaatctataataaacgtaaattcaatatttactttaaaatgggtaataaaagattgggcgaacttgtcgatgaacatcagcccgatattattattaatacatttccgatgatcgtcgtgccggaatacagacgccgaactggaagagtcattcctaccttcaacgttatgactgatttttgtcttcataaaatttgggttcacgaaaacgtggataaatattatgtggcgacagattacgtgaaggaaaaactgctggagatcggcactcatccaagcaatgtaaaaatcacaggaattccaatcaggccgcaatttgaagaatccatgcctgttggcccgatatataaaaagtacaatctttcaccaaacaaaaaagtgcttctgatcatggcaggtgctcacggtgtattaaagaacgtaaaagagctgtgcgaaaaccttgtcaaggatgaccaagtgcaagtagttgtcgtgtgcgggaaaaatacggctttaaaagaatctttgagtgcgcttgaagcggaaaatggtgacaaattaaaagttctgggctatgtggagcgcattgatgagctatttcggatcacagattgcatgattaccaagcccggcggcattactttgacagaagccacagccattggagtgcctgtcattctgtacaaacccgtgcctggccaggaaaaagaaaatgcaaacttctttgaagaccgcggagctgccatcgttgtgaaccgtcatgaagagattctcgagtcagtcacttcccttcttgcagatgaagataccttgcatcgcatgaagaaaaacattaaggaccttcatttagcaaactcctctgaagtgattttagaggatatcctgaaggaatcagaaatgatgaccgccaaacaaaaagccaaagtgctatcgtaatggcgtacttgagagcatacgaaaatcgtgtgctctttttatttatattcagccatcaataaaagcggttacatttttttatggaacttgcccttcttttgaaaaataagccgtttcgcaacttgacgggtgctcccagatggtgtatagttgaaccatcatttaacaatgaatcaaagttagatgatgacaaaattttttttagcacatgggtgctacagtactaggaggaattaagcaatatgcaaaacggtaaagtaaaatggttcaacaacgaaaaaggattcggcttcattgaagttgaaggcggagacgatgtatttgttcacttcacagctatcgaaggagatggatacaaatcattagaagaaggacaagaagtttcttttgaaattgtcgaaggtaatcgtggacctcaagcttctaatgttgtaaaactctaaactcaatacatgatgatgagatgacaaatagaggagaggcattcgcctctcctatttgattttcatctggatttcaatcgccaaaatgttttgtttacacctctgttcaatctcttcaacatacttttccattgatggttttccttttttcgcgatatcggccagttcttctaaatcactgtatatttctataaatgttttgtgaaggatcaacttcaagtctttatcatccatagctgcgttccccttctctatcaagatacctcaaatagtaaaacggtcctatttattctggttcaatagttatatcggcttatttttattttcttttctattttggtacataaatttcaaaaaaactctgcaaaataatggcggaggtgttttttgtgacttcagaatttcataatgaggatcagaccggctttacggataagcggcagctggaactagcggtggaaacagcgcagaaaacaacaggagccgcgacgagaggccaaagcaaaacattagtcgactctgcataccaagccattgaggatgctagagaactgtcacaatctgaagagctggcagctctcgatgatcctgaatttgtaaagcagcaacagcagctgctagatgacagcgagcatcagctggatgaattcaaagaataaaaaccgcagcttctgcggtttttatttttagtgattggttaagacatctccgtattgtttcaacttttcaccaaccgtacatttattgatacaaaatgaatgcgcataagttttgccaaattctttgcgaaactgcttcttaataaaacagtccttgcaatattcatcgtgcagttctgtcagttctttaaagatcattttcttatccaatatcgtcatctccgttacggtctaatttcgtgtggctttctacgaattgatgggatagaatttttttagcgaggccgtcagcttcctgattgtcttttcgttgtattgtttcgtaggttggagtaagcttcagcgattcaaggagtgcttctattttgtccagccattcattatgagatggatcataacaaggccagctgccgtcaagctgattcagcacaacaagcgagtcccctttgattgtaattgaatttctgcttgccccaagctctcttacttctcttattgcttcataaagcgctgcgtattcagcttcattattggttttcagccggaagcttttattttttctcaagcgatgccgggttcctcccaatgaataatagatgacgatcccgagaccggccagttcgctctctttatcgaaactgccgtcaaaataaacagtaatgtcatcaggctcttgagcaagctcctctgtcagcttttccaattccttcagcgtccagctgccgcctttctcgtcttcgaactctagctccttcatgtatggaaaacggccaagttctctggcgaacgtacgtgcctgctgtgctgtcagccagtcttcgctaaaaaatgagacggatcccgttccttttgcttctattttcaaatgcggtctgagcttcattacaatcaccttaccattcattagttgccgggcttatgctataatcaaaccaatcttaccccggaaaggaagctttttcatcttgtttaataattcgttttggatcttttttgcgatcattcattttatcattgttcttttattttataaaggatttggcaaaatgggactgtttgtttggatcggttttgcgacagtctgcgccaacctccaagtcgtcaaaacagtcgaactgtttggcttaacagcgacactcgggaatgtgatgtatggcacaatcttttttgcgacagatgtgctgaatgaaaaatacggaccagctgaagccagaaaagcggtatggctcggattctcaacgctcctgacgctgacatttgtcatgcagggcgtgctgcttttcgaaccggcttccagcgacatatcacaaacagcgctggaaacgatcttcggattccttccgcgagttgcgttaggaagtctgcttgcctttatcttcagccaaacgctggatgtttatgtatattcggcaattagaaggatatttccttctgatcggcttttatggctcagaaacggcggcagtacagcagtcagccagttgtttgatacattcatattcactgcagtcgcctttctcggcatttatccggcagacgtgtggcttcatatttttatttctacatatttgattaagtttgcggtatctttaatttcattgccttatgcctatgcagccaaaaaaatgatacctaatgatgaaaggagttcataatgcctacagaaatatatgtagacggcgcaagcgccggtaatccagggccttccggtatcggcatttttatcaaacatgagggaaaagcagaatctttctctattccaatcggagtgcatacaaaccaggaagcggaatttcttgcattaattgaagggatgaagctatgtgcaacgcgcgggtatcaatcagtttcctttcgaaccgattcagatattgtggaacgcgccactgagcttgaaatggttaaaaatataacgtttcaaccgtttgtagaagagatcatccgattaaaagcggcattccctctttttttcatcaaatggataccgggcaagcaaaaccaaaaagccgatcttctggcaaaagaagcgattcggctgaatgaaaagaattaaatcttgatcattggttcatcctaatggcgaggtgaactaacatgaaaaagaaagataaaggccggctgaccggcggtgttactccgcaaggcgacctggaaggcaatacacataatgaccctaaaacagagcttgaggagagagcaaaaaaaagcaatacaaaacgctagagaggatctaaacgatctctctagcgttcagcttttcaagcatacgctcaattcctttaatttggtggcggcgaagcatgtcagccgcctgctccatttgcaaagtaaataaagcgtctttcagtgtgcaggccagcggcactgagcaatggatttccgcaagcttcctcgacatctccaaatcgcttaaaccttgctgaatttttccctgctgtccttttggaagaagagaaagattttccaataaacggtcaatcgtttcgtattcacgaatcagtttgtaggctgttttttctccaatgcctttgactccgggatagttatcactggaatcacccataagcgctttaatatcaatcaaagccttcggcattacgcctgtttcttcataaaaagtctcttttgtatagactttataatttccgattcctttttgaagcaaagcaacgcttactttatccgttaacagctgaagtaaatctctgtcccctgttaccaccgtaatgtccgcttcattcgcaaataaatcggcaagagtaccgatacagtcatccgcttcatagccggcaaagccaatattcatgattccaagctctgcggctgcttcctttgccaaatcaaactgcggaatcagctccacaggcggcgcgctgcggttggccttataatcttggaacaagtcatttcggtacgttttgctccccatgtcccagcagcagacgacgtgtgtcggctggaatgtttccacagctgtaatcaaatgctttaaaaagccgttgacgccgttcgtcggcaccccgctgtcatttatcataaagttgcgatgtacggccgtggcaaaaaaggcccggaataaaagagccatgccgtcaaccagcaatagtttattattattcatcaaataactcccttttctttcattccttctattttatcataaagcagcccaaaaataaaaaacagtatctctttaattagagatactgtttgaatatttatcaatcgttgtgtcttttgttgctggcgatcagcttttcagcttcgcgtcctgcgtaagagtcaaaatgggtttgaaatccgtttttctttttggcgttgttattcgcctgtgcatttctgtttccgagctttgttctgcccaacatgaatccccccttacgtcggatgcatatagtatatgcttccggcaggaggttcactcgcgacaggatcatccagcttacatgcggcttacgtattctctgaccatttcttttgatacaagccgtcttgtcgggacgatgccttttttagcgagctgattcatttgctcggtaatttcattaattgcatctgtagtataaggctcatcgtttctgcatttagcaacagcttcttcaatcgccaattcacgcatattttcaagacgcataaatgctttgatatgctcgtgctgttttgatgaatgtgctgaaattgctttatgtacctctgacattaatcgttcatctcgcttttttctatttagtctatcatgacttgaaatacaagccaactgaattttacatttttattgtattgtctgaatttttccaggagatgcacgcctgatacgccatttcaatctctttcgcatgttccccttccgcatatcctcttaaatatgtctctttttgatccgttatttgcgcgattgctttttcacccatatcttcctgtaagcgtctgaggtgagcagtgtaatgagatatcaggctttcttcttcattttttatccatgcctctgtgattttcgtaagtttcatccgtacagcttcgataaaggtcgcttttcctttctgctcaaaaaactgcttcggtgatttgatctcttttagttcctgctcaaaagcacgttcttctatttccggttcaacttccttcaactgtatgccgttcgaatgctgatcacccgcataaacggaaaaataaccgtcctcgtttaatgttttttgaaaatgatccagccattcttcattgatatgccgttcgatgaaaccgctcatgcgaacatcaagcgttttgatttcctgaatatattcaaatagatattcatgtaaggctgttgtcatcgctttactgacgttctttttccaatccccgttttgcagcccgggatgaaatgccgattttaataaatcatttgcaaaatatgataatcgctgtgcaatgtgatatagctgctctcttgtatctttttttactttttcaatgatggtttttgagttccgccgtttctcgatatcggccgctgtccgctcaaatgacagcataaggcactgtttctgcgcttccttctcttctcgggactgatgctgggattggtgaagctgaaaaacagtttcgcatagtttgtctgcctccgaactgagctgcgctgctgacgctttttttacatccacttcgataaaccggtctaagtgttttcttactttcgagaactgattataaaatgactccggttttcccaccagttcctccttacttgatacggtaaagagctgcggctcataaaccccttcttttacaagctctgcgctgacataatcggtcactgtttcgagctctgttttatcttttgcaaggtctgcagcattaataataaaaaacattttatccatgctgagcgattctttcacaagtccaagctttcgcaaaaatgaacggtctccttttgaaaaagagtgctgataataagtcatataaaaaaatgcatcagcatctttgatatattggaatgccagttctgtatgccgtttattcatgctgctcgcgccgggtgtatcaacgatcgtaatccctttttcagtgagcgggcatgtatagtagaccgttacctctttcacagcacaggccgttgtttcctctgctacatacggctttaattcagagagcggaatcgttaatttcttctgttcctgtatatactgctgatacttctcgtatgcaagcaggaaattgctgatcaatttcacgtgttcttcctgcagcctgttttttttgactgccttttcccacttctctgtgaaggaacggcctgccggctcctttggtattccggtgagctgcaaaatttcagccgttaagtcatcctctgtcttaaacactacattcgctgttttgtttaagttgccattgattggctttgtgatcttgttaattgtcgctgtggttggcgttggtgaggatggcagcactctttcgccgacaagcgcattggcaaatgatgatttccccgagctaaagcctccaaaaagagcgagtgtaaatttccgttcctcaagccttttcaccctttcacgaaacgctgaagtttgctttaacaacatgctgcattcgcctaaaatgtcagacaaagtgtaaaagcgtttgatttggtcttgaagcggcatttcttgttccattttgatttctgatttcggcatcggctgcgccgtcagctggcttcggccttgtttctgctctggagccgccactcttgttttcttcgatttaaaccattctgtgtctatatgcattgggcatgcggactcttcttcccaaatggcccacaggcgatcggttttctctcgggcattattctctaaacgtgcctgttcttgaagaaagacaagtttttctgattcttggacgagccggtcgttaattgtttgcacatctttggaaacacgctctttcaccatagcggagagcacctttatgatgtctgcggcttctcttttcgcctctttccggatgagctctgccaagtcttttgtatattgcaatacatattcagaggaaaaggctgcaccatgcttgaccgcgtgttcaatgatgcttatatcaagcggtgtgcgataggcctgaatcagcttttcactttcagcggtatagacatcaaataccttggcgagtttatgaagcgtgtctatcatatgccaatccgcttcggcctctgttcgttttgccacatcagagaaaaaagcattccgccttttatctctttcctgtgcagttttcgctttagaaaagaaaaagccggttttaaaggaaggctcttgtgattctaaaaatgcagccgccaattcacgcatttcaaaaggcgtcaggttggcgttttttaaaatacgattgatttcttcctgcatcctcttctctgcctcagtcatttgtttttcggcctcatccaattgatcacgcagcgattggaccagtccagtatggatattaagctgttcagcgaaactcggagcgcctgtttcgtctttcttcagcatttccgtatgttcctttagcagattacggactttttgttcggttaaagcctgcatattgctttttgattgctgttctattctgcttaactcttctctcagggcccccatctgattgaacgggtgatccggttctgttactgatgtaaaatagagcgcttcccttgaaatcccttcattgcaaagcatctcctctacctgcgcttgatagtctccaaatttcgtctccgtctcatcatggcggtcaatttgattgacgataaaatacacattcggaatgctttcttttattgatctgagaaactttacattttcctcagcgtgcacgtgattatagtgaacgacgtaaaacagcgcatccgcttggtgaagaatagaagcagccgatagaaaatgcgcatcatctgttgaatctatccctggagtatcaatatacgcaaccccggaatcgatctcagtatacctgtcaaaaatttcgacgctttcaatctgttccccgtctttacaatattgctgcaccttgtctttctggtaagtcccttccagctcagcacacgctccgtctgttgtatgaagccgaactcgcttttccccgtttctgatcacaacaaggttagcgcttgtcggaatcgggcttgtcggcaaaatattctccattaacaggcagttcagcagtgacgatttccccgctgaataatgcccggtaaacgcgatataaacctcttcatcagccgcttttttcatgaccgcagccagtttagcagccctttgttcatcttgattctcaataaattgcttataaagttccccggttttatgcaaaagctcttttctgttttgatctgtcataagtctgaacccctttgtgccgtttcaattgtgaacctttttcgaaagatctgaattcattcccttttcattttacacaagaataaaccaaatttctttaggagaatagaaaaaagccgccattacggcagcttctataaaagaaaatctgcaacttttacaagttccagattcatcaaacagatttattagagattccttttaatacaaaaccaattaatacactatatgtacaaaccgctccaagcaaaaacagcattgtcatttgcttcaccatcctgattgagaatctttttcaaacccattttaacatggttgagaatgattttcaatcgctattttacgctgtattcctgtaatgctttgtcttctgcgcgaattctgacgcttaacaacacggcattgaaaatggaaaacagacacatggtgacgtatgcttgataaagcagcggaatcagcaaaatttcgaggataacaacggcatagtttggatgtttcatccatttatatggacctttttttacaagctctacacctggaacaacaaggattttcgtattccaatatgctcctaaggaacaaagcgcccaataccgtacgatctgtacgcttaaaatcactgcagcgataccgagccaccagctggacggctgtttattcatcagcagcacctcggcaattaaggacaggaaaaaaaggatatgcatcgtaatgatatacggatagtggctctcgccaaattcaattgctccttgcttctttaccttttgttcgttttgcctggccactgccatttctgctgctctttgaacaatgagaatggcgatcaacaaccaaaacatgagtcaggcccccttttcccagctgaataatagcaactctgatgagaaacccggccctaatgcgccaatcagtcctcgttcagcttcctttttatgtccgttctgcagatggtctttgatcacatacaagattgtggctgaagacatatttccgtgcttttgcaaaatgctttgcgcagatgaaagcttttctgacgacagcccgagacttttgatgtatgcatcgatcactttttttccgcctggatgcgccaaaaaaacactgatatcatggaatgacagcttatgtttgtccaaaaaaatctgtacatttgttttgagccatttttccaccaaggtcggaatgtctcgtgagaaaatgactttgaatccttgatcggtaaagtcccagcccatgacatcttctgattgtttcatcaaaacagattgggcgtccattatcttcggcgcaagcttcagctttgacaccctgcggtccgccttctctccgcataataaagctgcggcaatgccgtcaccaaaaagcgaggtgccgatcagattgctttttgttttatcttccggctggaatgtcaggctgcacagctcggcagaaatgacaagcacaaaagcctcaggatacgctttgcagtattcggctgcacgcgcaagtccgctggctcctcctgcacagccaagcccccaaatcggaatccgcttcgtatatggagaaaacggaagttcattcataagccgcgcctcgatactcggtgtggaaagacctgtactggagacgaaaaaaacagcttccactttctcataaggaatggcttcttgaaaaaattccggatgagagaggcactcacgaacagccgctctgctgtgtttaagtgtttcttctatgtatatttgatttttttcttcaaagctgtgcccctctttataccattcaatcggcttaacaaactgtctcgaatggatttgcccgtttttaaaggaggataacagcctgtcaatatccttaaaagaatgctgaaacatatagcgggcgaactcggccgctttctcttggtttacattatacgcaggaagacttgttccaatggataaaataaacgccatgcgatcacctctttgcatacattgtgccgcaacaatcttttttatatgcaaaaaaaactccgccgcggcggagttagactgctgttttttgttcagcgaggtcagcttcttgttctatttttttagctttagaaaaaacgttatatacaatatttaagacgactgcagtaaagctgcccgccacaatgccattcgttgtaagcagcgttaaggcactcggaagctgtttgaaaatatccggcacaacggtcacaccgagccccaatcccactgagcaagcaacaatcagcagattttcctgtttcgcaaaatcaatgcggctgagcattttaattccgtaagcaatcaccattccaaacatcgccaccattgcaccgcccaaaacagcggatggaataatagtcgtgaaagcagcgatctttggaaacagcccaaatgccattaggatcacacctgtgaccacaatgacggcattttttttgatccctgtgagctgaacaagcccgacattttgagagaatgccgtgtaaggaaaagcgttaaaaataccgcccagaagcacagccagtccttcagctcgatagcctttagacaaatctatctctgtcaaacggcggtttgtcaggtcacctaaagcaaagtaaacaccagttgactccacaaggctgacaattgcaacgatggacatcgtaatgataggcgctgcgtgaaaagacggcgctccgaagtaaaatggctgaatcatttgaacaactgccgcgtccgaaacattatcaaattgaacttttcccataaaatatgcgatgaaggtgccaatcaaaataccgatcaaaatcgagacggacttgataaagccttttgtaaaacggtatagaagcacaatgatactcaacacggtaaaagcaagtgcaagattggagagatctccgaaatctgcacttccttctccgccggccatgttattcatggcaaccggcatcagtgtaataccgataatcgtaacaacagagcctgtcacgaccggcggaaaaaacgatacgagctttccaaagaaaaatgaaataagaatgacaagaatgcctgaagcgataatgctgccgtaaactgttgaaaccccatattcagatccaatcgctatcatcggcgatacagctgtaaaggtacagccaagcactaccggaagcccgatcccaaaaaatcggttgctccacacttgcagaagtgtagccacaccgcacataaaaatatcaatcgatactaagtaagtcagctgctcgacagtcagtcccattgcttttccgacaatcagaggaacgacaatggcgccggcatacatggcaagaacatgctgaatccctaaagacagcgttttgccgaatccatttctcatgaatgaacctcctgtacgaaggacacttttccttcttctaaagactgaattcttgccaaagattccactcggtagcccagttttacaagttcatctcttcccggctgaaatgacttttcaataacaatgccgattcccgcaatagaagctcccgcttgcttcacaatcgacacaagcccgtgcgctgcctgtccatttgccaaaaaatcatcgataatcagcacatgatcctgatccgacaggtgggtcccagacactgcgatttggctttctgtttgcttcgtaaaggaataaacagacgctgtcagcaagttgtcggtgagtgttaacgatttatgctttctcgcgaagacaactggcacacccagcttcaagcccgtcattacagcgggagcgatacctgatgattcgattgtcacaattttggtaataccgtcttttgcaaacctagacgcaaattcatcaccaattctctgcataagcagcggatcaatttggtgattcaaaaaagaatccactttcaatacctgatcagataatacgacgccttcttcctctattttccgtttcagtgcttccatcctgtctacctccgttatgagaataaaaaaagcattgcccgctcaaataaagagcaagcaatgctgatatcacaaaaaaccgtacacgtgcggttccattgctcacccatagtcggacatttacggtgcccggtagaaacttgcgtgccatatccacgcgattatatgagtgttcctattatattgtaataaattatatcaagattctaatctcttgcataggctgaaaataaaaattcccgaactttaattttgtttttttagatatcattcgtatttcaaggggattcgatataaaagagtctgacgaccgcgccgccaggcttttgattataacagatagagatttgaatatttgtttgataaataatcaattaaatagcgaacattcagctcttctcctgttgcatctttaataatgtctaacggctttttccgttttccgtgaatgtgcaccttttccgtcagccattgctttatcggatggaactctcctctttccaagagagcgtcaaattcagggagatcctcaagcattttttgtttcagctgagccgcatacatgtagccgagcgcataggatgggaagtagccgaaatctccacctgcccaatggacgtcctgtaaaatcccctctgcgtcggtctgcggtgtaatccctaaataatcctggtatttttgattccaaagcgacggcagatcttccacagacacttcattgctgaaaatcgctttttcaatttcataacggatgatgatatgaagaggatacgtcaattcatccgcttcgaccctgataaatgaaggttttgattcattgattgcccggacaaaatcatccagggagatgtccttgaactgtacaggtgatgcctcttgaatcttcttatagtacggagtccaaaaatgcttgttgcggccgataaaattctcgtaaaataatgattgcgattcatgaattcccatcgatgcgccgtctgacaagttcgtgccactgagtgcttcatcaatattttgctcgtaaatcgcgtgcccgcactcatgaatggtcccaaagatcgccgtccggaaatctttttcatcatatctcgtcgtgacccgaacgtctccccgattcagcgtagttgcaaacggatgaacggtttcatcaagtcttccgccatcaaaatcgtagccaagctcctgtaaaaaatacagactgagctctttttgcttttctttcgggaacgcttttgtaataaagcttgtatctggtttatttccggaagctgtcacctgtttaacaagagggataatcgcttccttcagctcagcaaacaactgatcaagcacctttaccgtgacgccgggctcaaacaaatcaagcaatgcatcataaggatgctcttgatatccccaatacgtaataaaacgtttattgaattcaatcagctgttctaaataaggagaaaacaagctgaaatcagattttcctttcgcttcctcccacgctgtttctgcctttgaacacagaatcacgtattctttgtattcagcctcagggattttcttattctcttcatactcttttttcgccagttccactgcttttttcgtatcttccgacaagtcatcaaatcgttcatacaggacatcgataagctccttcattcgatctgatgtttggatattgaatatatctgttgaaagctggccgatactttcggcacgatcctctgagccatttttcggcgcgcctgttctggagtcccagtgcattaacgcaactgcttcgctgtaatgtgagattctttttaaaagatcaaaaaattctttttcatatgtatgtatctccatatccattccctccctattctagccgttccattacaggctaatggaagggggtatgaaagtcaaattgtttgtataaaaggctgccggtatgttttgtggcagcctttttattcagttgatcgtcatttgattttttggcggaggtgttctccgctttttctgcttgatttttttatctacccacactgttgccagcggggttaagagcgaggtgacaataacgcttgtcgcgataattgcagttgccgactcagcaactggcgcaaatgaggcattcgcttccgctaatgcatatggcacggctacagccgcccctgccgtagaagaagcggccactcccgcgacaccatctccccgcgcaataaaacgatcaagcaaaaacaaagaactgcccgataaaatgacgacagaaactccgataaaaatgccgagcagccctgattggatcagcattccaaaattcaaggtattgccgagcgaaaaggcgaaaaatggaatgatcgccggcacaaccttgctgaataagtctctgagatcatgatccagatttccaagtatacatccaagtaaaaacgggatgactgtcgctgccagcgtttcccatgggaatgcggcaagtcccgtcacaccaaacgtcaccatggtcataaaaggaccagattctgtactgataaaggcgaaagcgcccgcatcctcttttcttcccatgtgattcatgagcgccaaatacagtccgccgttcgtttcattcattaccgcgacaattgctaaaacagaaaggcctgcaaaaaagccggattgtatgccatcgtcaggtataaattgcgctgcgatcacgccgagcagcgccgcaaatccgatcttccccaataataacgtgattccttttcttgcgatatagcctgaagaacgaaaatcaatcgttgctcctacgcaaaagataaaaacacccagtatcggcagcgttccggtaatcaaagcacccgtaaaccctccaaagaactccgctgttccaggcgcaaacgtgttgagcgccgctccaagaaatagcggaataatcatcattccgccaggtacccgttcaattgtcgccttgattttcatattgtggattctcccatcctccggttatgaaaaaacaattccacttacacttggaaaacagcctgcaaatcctcttttgaacagctgcccaactggctgccgactccgacggcgccagctccggctctaagccaatcaggcacttcagacggatgtatcccgcctgtcggaataaaggtcacctgcgggaaaggacccgctaaatttttcataaacggaatgccaaacacaccgcttgggaacagctttaatgtcgtaaaaccgaatgtcagcgcttccataatttcgctcggagtcaagacgccggggatataatgtgtctttacaaaagatagatgttcagcaagatcagctgaaaaacccggactgacaataaactgcgcgccagccttagcagcttccccagcttgctgcgcgctgatgaccgtacccgcgccaattaaaatatcttccctattacggaaggattcgataatatctgatgccccgggggtcgtatacgtcacttcaactgcacgaatccctttatctaataaactctcaatctgctgacaggcctcctgcttatcctttgaacgaatgactgcaatcagctttgcttctttcagacggttttcaacgactttggactccatattaataatcccctttcttttggtgaaccgttctttgagcagataaaaaagaagctaatttctccctggtcggcaaaccgtccatatcccccggtgcctgcacttgcaaagcgccaatcgcatttcccctttgcaccgcatccttgtacgacaaaccgtctaggataccgctgattacaccgactgcaaatccgtctccggcgccgaccgtatcaaccacccggtcgacccggcagccttctagaaatccttcacttgtccccgttttaaagtaagcgccttcttttccaagtttaatagcaacaaagctggcaccttttttcaaataatagtcggcaatgccttcaggtgttttttctccggtcaatagctctccctctgcgatacccgggaaaaaccagtctgcaagcccagccagatcattgattgtgtgtaccattgttgcttgatcaggccaaagcgaaggtcttacattagggtcgaatgaaatggtcttccctgcgtttctcatgtcgttcatgacatgatacgtgaagtctttcatctcggctgataaagcaggcggaatacctgtcacatgcaaatggcctgcgcattgaaaataatctctcggatattcagctgtagttaatgtgcttgcagctgagtttttcctatagtaggtaacttgcgggtcgccttctttcacttttgacttcagcagcagcccggtgggattttcgtcctgcgagcggatcacgcgggacacatccactccctcttttttaagctcttgtaaaataaacgttccgagctgatcattgccgaccttgctcatccatcccattcgaaatccgagtctggcaaggccgcaggcgacattgctttctgctccggcaagccctttagaaaaagtggatacttcatgaaggcctccatactcatttgcataaaacatggccattgattccccgaatgtcaccgcatcaagcttcatctcttcccaacctcctcttagttgagggcacctaggattaaagtgactttctcatgatgacttttgcctctaattcaatggtttgaggcgctcctttgtcaccttcaatcctttttaatacacgttccatcgccgtcctgcccatatcatgtgacggctgggcgatcgttgtaatgcctggaccgatcagtttgtaccactccgtatcatcgaatcctgcaatccctatatcttgagggatgcgcaggccaagctcttccatacagctgatgattttcagcataatcaagccattcaaagccagaatcgcttttttttgctccggcatttccttgtgaaaagaacgaagctccgccttaagctgctccttgtcctttacgtcaatttcatgcaatctgacaagcccgttcacattttgaaccgaagccatttcctgatacacagctgctctttctgcacgagggctgatagaggaaatcggttcggtaaacagcgcgacatcagtataccctttgctgtacaccttctgaagaatctcttttgtgatccatctgttgtcagtcgttacggtatccagtttcagatccggcagtttccggtcaattaagattgttggaatttgctgttcagcaaaagcgcggagtacatccttgttttcccctgttgcgtttaaaatcaagccctcaaccgaatgggcttctagctttaagagcatttcccgctctttttcaggactgttatctgtgttgcacaccataatgctgtatccatattgatcacaaacctcttcgactcccctgaaagcagcgaccgaaaaaggatttgtaatgtcagccacaacaaatccgattaacttgcttttttttattttcaaaccttgtgccattttactcggccgataattcaattctgcgattgcctttttaatgtttttcactttttcaggagaaatcgcgtcaatttttccgttaatatagcgggaaactgtcgatttcgaaactcctgcacattcagctacgtctttgatggttgtatggcctgttgttttctttttcattcaagtgctcctgtatctcatatatttgaaaccgatttcaaaaccgttacaacaaaagaataccataattttaaaatttgggaagagtttttttaataatatgtcaattcattattttttcgttgactcttttcactatttatcctaaaattttctttgaaaccgttaccaaaatattttcattcaagtgatgctgaaatcctaaccaagggggaaatataatggaaaatcgttattctgtacatcctgaacaagtaaaacgctttacaacagaggagcttcgcagtcatttcttaatggattctttatttacagaaaacaaacttacgatgtattactcacatgaagaccgggttgtcatcggcggagcggctccagggcaaagtgaactgaagcttgatgcaggtgattttctaaaaacagacttctttttggaacggcgtgaaatcgggattattaatgtcggccagcctggtgccgttagagtcggcgatgatgaatatgtgcttcaaacaaaggattttctctatattggaatgggcaatcaggatgtatcgttttcaagcctgaacggggaaaaagcgaagttttacttcgtctccgcttgcgcccacaaaagctatccgacacaaaaagccgccctatctgaactgacaccggaccgccttggtgatgatgcagcgtctaatgtcagaagtctgtacaaagtcattcatcaggatggcattaaaagctgtcagctgatgatgggaataacgatgttagatcaaaacaacaactggaataccatgccagcacacgttcatgaccgtcggatggaggcttatctttatctggatcttgaaaaggactcaaaggtatttcatttcatgggccagccggacgaaacacgccatcttgttgttggaaatgagcaggctgtcctttctcccgcttggtctattcattctggcgcaggaacatcaaactatagctttgtgtgggcgatggctggagaaaattacacatttacggacatggatctcattccaatggatgggctgaaataagatgggttatctacatgacgccttttcattaaaaggaaaaacagcgctggtgacaggcccgggaacagggatcggtcaaggaatagccaaagccctagccggggctggcgctgatattatcggcacatcacatacaagcagtctgtctgaaacacagcagcttgtggaacaggaaggccggatatttacatcttttacattggacatgagcaagccggaagcgataaaggattctgcagctgagctgtttgaaaacaggcagatcgacatccttgtcaataatgccggcattattcatcgggaaaaagcggaagattttccagaagagaactggcagcacgtactgaatgtcaatctaaacagcctgtttattctgacacagcttgctggcaggcacatgctgaaaagaggtcatggaaagattattaatattgcctctctcctgtcttttcaaggcggcatcctcgttccggcttacaccgcgagcaaacacgctgttgccggtttgacaaaatcatttgcaaatgagtgggcagcgtcaggtattcaggtcaacgcaatcgccccaggctatatttctactgcgaatacaaagcctattcgggatgacgaaaagcgaaatgaggacattttaaagagaattcctgccggccgctggggccaagcggatgatatcggggggactgcagtctttttggcatcacgtgcttcagattatgtaaatggacatattttagcagttgatggcggctggctatcccgctgacaaataaaaaagctgacgaacgatcgtcagcttttttccattacatcatgtgcggttcaacaggcaagacctttttgacctcatcaatgatgcgttcattttctccgccagcgtaaatgtgaatcgagccgctgtcttgattcgagcgaatcaggcgcccgatgccctgccgtacacgtaacaacatatatggcagatcaacttcttcgaacggatcttttttcgctccgttgcgcttcgctgtaaatacaggatcgtgtggcgggaacggtaatgaccaaatggtaacattcttcaatgcgtcaccgggaatgtcgagtccttcccataagtgaactgaacaaagtactgtttcttcttcctcttggaatttctctactaagctgctgatttcctcatcaccttcgaagaaaattggatacggcagctcccatgccgccgacagctctttaaactcgtttaattcttcaaaagaagggaaaagcaccagcgttcttcctttgtatcgtttgattgtttcaatcgtttcagccgttttttgttcagcgtccatatctgtttttgcgtatagattaatactcatttgctcgtcataatcataaggggaatcaacagttaatgacaaataatcatgaatcccaagactgtcggcaatataatcaaacgaaccgccttctgacagcgtagcagaagaaaagatataaggaattttcttagaaaacactttttcgccaagtacttctgctaccgttctcggcatcacgacaaaggttgattctgcttcctttttctccagccagctgatcgcatccttttgatatagagataatgaatacgccatttgttcaacatattcttccactactgacagttcgtattgatcaatcgtatacatttcagactcaaatacaagtgcctcaccgattttatcaagtaaacggcaaagctcgtccgccgcctttttgacacgatggtcattttttatttctaaacggtgtgaaccggctacttcctttgattcttcagaaagaacatagaaaaattcgtcgtttgcgagaagcgcatcttcaatcaattctgcaaactcttctctgatgtcattttgcagcaatcgttctaaaaacaattcaagagtagactgcttcactctataggttagcgctttttgcgcagcaaactctaacaagtgcccctcatcaaatacaactgcactatgatcaggcaagagcggcagctggccctctcgtttgcgtgattcttccgtccacacatgctccatataaaaatcatgggaacaaatgattaagtccgttgacttgcggtagtaatctctggaaagtgtcagaccgcatctgtgtctcatatcacaagtcagacagtcctgaaacgagtcgtagcttacgtcagaccactcttcattcgatagatttgcgtactgcttacggtcgccatacggataaaagcgctgcatcgcctgggactcgtggacaaatgacggtaacgactcataaagatccagccatttatcatcatcagaacgctgcattgttttttcaagcttcttcaagcataaatattgctcatgtgattttgacagccttgtatcaattttcagatcaagatgctcagccagcttagaaatatcgccctcttttttcaccagctgttcaattaatgtttcatccgcacaagcgatgatggcaggtttgccgacataccttgcatagctgattgcaaaaagaagatataccagcgttttccccgttcccactccagcttcggcgaacatgacttttttctctttaaacgcccgctccagctgaaaagccataaatacttgctcgtcccgaagatcaaaccctttttcgggaaggatatcgtaaaacacgtcaccaatccaattgttcaattcttcataaaaattctttgttttcgttaaagaaaaaggcaaacgtgatgttgtcacctagttccaacccccaactattcgacattcagaccaccaataatatcattttccgctgatgaatacaataaaaaacttggcaatgccaagttttttgcagtttacttacgattgatcacatgcgacgataaaaaaggatggtctgttgaataaatatgttctaccgctttttctaaatcagtttgcgcatgcgaaatcacagacggagacgaatcagtcccgagctccttcagctcgtttgctgttgcgtcaagcgccctttgaataagattaaaatgttcgctgttcagcatgagatcacctctgatggaaataatcatcattgtatgcgaacttttcattttatatacatgctttaccgcatgttatcaccgaaacatgcacaaactacacttgatattccgtctccggattatccgtcttatcaacaatattctatcagggagtgatgttgacatgagttatagaaaccgattagatcagcattctgaactgtttcatcacaattggacgcggcctaaacgttcaaagtctcaagtaaacggtcacactgaaatgtcccaaaccaacattatattgagaagcaacgcgaaagctcaccgttggtaacgatagaatagggctgaaagatgaaagaagacgcatgcagagcgtcttctttttatgcgttttctgttttcttgcgctgcggtcttacttttgaccagtattgataataatccgttttaataaacccgttaaagagttttcgtttcttcgttgcttttctgccatatgcttcctcaaagttttcatttgatgtcagcatatacacagaccaagtatcaagcggctcgaacgcctgccccatttctttgtacatctgctcaacggcttttttctcgccgagacgctctccatatggcgggttgccgacaattacgccaaattccagatttgtggtaaagtctttgacctgcatctgtttgaactggattagatctcccaatcctgcttcctctgcattttcttttgcgatttgaaccatgcggtggtctatgtcgctagcgaaaattgtaagcggctgatcataatttgccttttcttcgacttcaagccgcgctttgttccacagatctttaccgatccattcccaatcctctgatacaaaatcgcggttgaatcccggggcgatgttttggccgattagcgccgcttctatcgcgattgttccggagccgcagaaaggatcaacaaacgggcggtcaggcgtccaattggttaattgcaccaaagcggcagcaagtgtttctttaatcggcgcaccgccctgatcgacacggtatcctcgtttgtgaaggcccgtccctgatgagtccagtgtaatcaaagcctgatctttcaataaagatatttccactttatactcagcacctgtttcttcaatccaatcattggctttgccggactgcagcttgagcttttcgacaattgcttttttgacgatccgctgacagtcaggaacgcttgcaagtgttgattttaccgattttccgatgacagggaatttcccgttttcaggtataaatgagcgccagttaatcgctttcgttttttcaaacagttcatcaaatgttttcgctttaaaagaagcaacctgaacctttatgcggtcggctgttctaagccaaaggttcgcacggcagatggcaagtgcatcaccttcaaaaataactttcccgttatcaaccttgcattcgtatcctaaatctcgtacttcctttgcgacaacagcttcaatgcccatcggcgccgttgcaattagtgtatacttcttcatcgtatcaccctgtcttttaaaacttttctcttttcaagataaaagctctccttatacgggagagcttgttttcatcattttaaatgtaagtggtctaacgttctgtaagccatgttttgttccatcgtactgcaaacggctcatcacctcgtactcaggcggcaatcatctatctacagaaagcattctgtccttctctccgttgaattccgttaagaaggttcccctaccaaaatttgggtttctcgctcgaggggtttaccgcgttccactctcaccatttctagtgagacttcgtcactgtggcactttcaaggatactcagccatatccgaagacgtaggcttttttcctgccgtcagcctctaaagactgccctagcttatgacttcgctaggcacgaacactacgggcatctcagcaccgtgcgagcatggactttcctctacagattcaagatctgcagcgattacccgaacgttaagaacatgaattattatataacaactgattacaatttacaagcgccatttttttcaagcgtgatcaatcataaagcttgctgccaaaaacgtgtttttctaagttagacagccgttttaaaatatcaaagtttgttgtgttagattgcacaggctgttttttgctggcttcttcaagctgttttttcagctgcagattttcctgctgcagttcttcaatttcttgatggaaggtttcataatccttaataatcatatctaaaaatttgtcaacgtcttcttgcttgtagcctctaacgcctgttttaaattctttttccaaaatttctttcgcagaaagctttactttatcagcaagcatctttttcacctcgtatcgtgaatcatcacatatattttttcagaaatctgtacggttgtcaaatttctctctcattgttagtagctgtcttcctccactgtcactctcaagtcatccattgtaataaagtagatgggatagccatcctgttcgcgccttttttccgctgtcccaagcatatacttaggggagccttccttttccgggtcatataaaagcagaagcccgtcggacttatcaatgaagaactgatttttttgtttgaattgaagcgggctttcataaggacggtgagtcaggcttgcttcatagtctgcctgagccagaactgcttcatactgttctttattcggttctttccagttcttttcctgctcgtaaaatggtgtgatgacagctacctttaagtcagggtattcctcctgcaaatcatatgcagcttctgccgcccacagctcaactccaagctggcccgaaattaaaatccattctaatccttcatccaaaaaagcaatcagccggtttttaatggctttttttatgtaatacagcgccttgtcatcctgcttaaatatccccagttcaaacggtttatagcccgttattgccaatactttcatcatttcacctgctttaaaaaatggggctcccgtgggccccatttgttgtgctgcattgtttacaccatcaagctgcacgttttccatactagtagtcgcagcaaggttttcctgcttgaaaatgctgatgcgtagccgggtcaacatttgagaaagtgtgtggaaagtagtgaacgtgctgaaaatgctggtggtttacgtttgttgtatgctgtgggtgaatgtgcggcacgatagtcttcgaaaacgtatggtgttcacagcaatgagtaggatggacaattggcgccatcatatgcggtctgcagtgatgcatgataaaatcccctttccataaactttattacaatactaagttatgaaaaataaggggtacatgttctgatgcaaagacctattttaaaagtgtgcaattaagctgtctttaaagtttgaaaacacaaaagcaatcaaaaataccacaacaaagaacaagtaaaaaacacccttatacataccaactctccctttaaaaataactaacgtcattttacaggattcgccgctattctacaacaaaatcaatgtgaattcagcaaaaaaaattcatggcgaaacaagtcgtcttttgcgctttcccggggaatatttaagaggaatatttcctctttagccgggcaattctcacatgcagtttttcagtttctttctctgataagcatgccgcatcgctaagcgattgctctgctacttgcaatgcttttccgaattcttttttcttatgctcaaaatatttcgcgagctctattacagcagcgtatctgcacttctggttttgcgagcgggacagcttttcccaaagcggcactgcttcttccaagcggttttgttttttgtacaggagcgataaatccagccgtgcactgtcctggtcctcaaacgatttttctataagcctttccaactgcttgatcgcttggtccgtttctttatgagccataaaccatttcgccatagcataggcttcactgtgttcttttggcgcatgtgattctgaaaggatttttttagacatatggatgtacaatgaaatgagtgataacacatccatttcattatgatgcaggacaccttttaaaagatccggctcttgcgccttgataaaatgaaagtaaagcattggcgccaagtagcccggtgtgtcttctagcctgcggatgccgagctcctctttttcaaccgtgccaagagatacacggtccattttgtgtttccacaggcgtctagctccatgcaaaagatcaaagtggccaaactccggaagcttcggaagtctgtcacggatcaaggtgtgccttgttttcacctgcggccaatcaaaggctttgccgttgtaggtcacaagtgatgtaatgtcaacctcgcttaaaaagctttggtacaaggcgacttcgttccccggtttgggcaaaagatgctgtttgactgtcactcggtcttcatatactctcgcatgcccaagcaaaaaaatggtattcccagctccacccccaagaccggttgtttctgtatcaaagaaaaagaggttgtttttgttatacccttttgctgacaatgtatgcgacaggccgctttgattccacagtgtgatcacttcctcaagctcagaaaagctgtataacccatggcggtgagaaagcggatattctacttctctgatgaggcaatattcatcttcgaagatgaaaggcttcatgccaaaagcctcccactcttctaaaaacgggatgtcatcaaagtggttttcttgtttgcctgcttctattttttgttctccttcgtcgagcgccatgtgctttttcatccgttggagtttcccttttaatgacatatccggcctccctccttacgacatttgatccaacagctgcaaaattctttcctttgcttttatcccttctatttccgtacctatacaagacggacagccgtcatgacaaggacaatgtgtaatcagttgtttcgccgcttcattaatgtctgaaaaacgtttaaagacttcctccgccaaaccgataccgcccggataatgatcatataaaaatatggttggcaatccggtatgggctgctttaatttgagaaacaacatgaacatcatttcgatcacacatgatatacacagggacaatatgctgcagcacattcgagatgccaagaagcagctgttccagtgtcttttccccgatgtcttcatccgctgttttgatttcgagccaagctgcacttgtatgcagttcttcttccggcaaatgaataggtccagacccaatattttcaaaagtggtcatttttatttttttaaaaatggtcggcagggcattgacagtgacgtctccgtagtgcaatgacgtacggcttttttctttcgttttatcgatttctaataccttcagctgaactgccaggtttgcatccgtataatattcgacatcgacttttctgacatacgcctttttatggtcccaatcgagcttctcaacttgatactgaacgccttcatgcaaataaatcgcttcatcatgcaaaagcgtcatcgcactaaaacggtccatttcaccgataatccttacatttgcaatatccgactgatcaactataacgacattttcctgggaggcggaacgcaaactgatgtttgacgcagggaacgactcacttgcccaatggtaccgttcgccgttgcggtgaagaacagcctcttcctgaagatactcaagaatatcactgacttccatggctccaaattcttcatcagctctaaaaggaagctcataagccgcacactttaagtggtctactaaaataatcaaattctccggattgattcttgcagattccggcgaacgattaaagaaatattcaggatgccgcacaatatattggtcaatcggtgttgaattggctaccatgataatcaaagattcaccgtgtcttctgccggctcgtcccgcctgctgccaagcacttgcaacacttccgggataccccgtcattacacacacttgcagctggccgatatcaacaccaagctctaaggcattcgtactgaccactcctaaaatgtcgccttctctcagtcctctttcgatttctcttcgctctttcggcagatagcctccccgatagcctctgattgattttgttccaatctcttttttcacaagctcctgaatatggcttaaaataatttccacccgaactctgcttctggcaaaaacaatggtctgcactttgtttttaaggaactctttcgccagttcattcacttctgcggttgcgctccttctaatattcagcggtttgttcacaattggcggattgtaaaacacaaaatgcttgcgtccgctcggtgcgccgttgtcatcgaccagccgcatcggtttgcctgtcagctgctctcccaattcctttgggttggcaatcgttgcggaagtacaaataaaaactggatcacttccataaaaccggcagatccgcttcagccgccggatcacatttgccacatggctgccgaacacacctcgatacgtatgaagctcatcgatgacgatatacttaaggttttcaaacaaactgacccatttcgtatgatgcggtagaatggcagaatgcagcatatcggggtttgtaatgacaatatgacctgcttttctcaccttttgtctgattgccggagacgtatccccgtcatatgtaaagcttttaatatcaatgcccatttcatcaataatttcatttagctcgctcttttggtcttgtgccagcgctttagtcggaaataaatataacgcccggtttgtttcatcttgggcgatggactgcaggactgggaggttgtagcataacgtttttcctgatgctgttggcgttacggtaacgatgctctctcctttttgcacatattgaaaagcggaatattggtgagtatatagttcatcaatgccccttttcgaaagggccgctttgattctctcgtctatactttcgggcataggccttgtttttgcttcccgaggctcaatttcatgccaattcacaacgttttcatttccttttaaatcagaaatgagttcagtcagtgatttctttttcattctttacacctctttgtcaagtacagtttaccgaatatttgtttgcatggctaggtgcaaattttatacagttgaataaaaaaagcaaggcatacgccctgcttatttcgcttttattgtaaagagctttgattcgcctttacgagcagccttttcgcctgccgataccattgatcctacagcctcaccattcattataacgattgggatgactgtgctgctcgctttttcttttattaattccaaatcacatgtaatcagcgggtcaccgaccttcactttatccccttctttaatgtgggcagtaaatccttctccgttcatattgactgtctccagcccgacatgaattaacagctcaattcccgagcgagtccgaatgccaacggcgtgtttggtgtggaaaatctgaatgacttcaccttcagcgggagaaacgatttcaccgctagaaggttccaccgctattccttctcccatcattttctgtgaaaaaacagggtccggtacatctgacaggtccattactgtaccgtctgccggagaataaataacctcttctgtcaccttttcctgaattttgcccattccgaataattttttcagcaatgtattttctcccttctcattcacttcaaccgttatcccttcattcaccactatttaaccacactttcaattttgcttcaatttataacaacatctggcatagacgcataatctggttaaaaaaggcggtggcgatattggaattccatgatgacaaaaagaacgaactgcaaaagaaagaagaaatcataacggaggcaatcgacactctttttcaatcctcagcgttcggcaaccttataaacggatttcagaacctaatcaactcgagtttaaaggatgtgcagacgaccatacatgtcagagaaagagatactgggctgtatatcgatattaccattccggcgacgtttcgagatggcgagatcgtcgttgatgttaaatcgaggtatctccatgtaacactccaagaaaaacagaaacaccaaaatgaggctacctttacaagcatgacaagaacggttcagctgccttatgaagttcgccaagaagatatggaaacgtcttggaacgagcagacaatgacacttttctttccaaaaaataagcatgaatgaacgattcattcatgcttctatcatttaaaaaagctggtaaatccctttattaaagatccgacctgattcattgcactcattacttgacctgtcgtatccatcattttattaaaatcaaattgcccattggcttttttgaactgcgacataatgctttgaaattgtgaaggctgctgttgattaggccttgggataggataagggttagaaaatacaggcggctgcataggcataggctggatcggagcataaggctgataataatcctgctgtccataatgctgctgaggcagttgttgctctaaataaccgggtgcagcctgctgataatatccttgcatatgctgaggataataatagcccatttgccgaggatagcttcgagagctcccgttcattgcgattcccccctaaacacaacatatttctcttctatatatgtatgaatgacttctattgtttgtgtcacaagtgatgattagcatttgtcaaattgtgtcgaaagtttaaattttttaaaaacagaaaaaagtcgaatcattatggtaccatattttcaatacagatgagaggggatgcaccataatgaacgtatcatacttaagcaaacgttttgcagaaatgaagaaatatgaaacagactgtatgaataaactgatggactttgccaagttcctctatattcaaggacatctcagcataactgagtttcgtaacagtatgaaggttctcgaagcaaatggagcagaaagcccggcatatgagatgaattaacgtccggccccctataaaaacgaaaagaagacagccttttaccggctgtcttctcttgcaatttcatcctttactgcgtgcaatgtataaaggactgactcagtgatgtccttgaatcgttttttatgaatatgatgaacataagattgaaggaccaattccaggaaattatcctttacggcctcaatttgctctttatgcacatattttggccggcggacttttatcaattcaagagcaccctctgcccagcgagcagccagttcatcattctcttcaactgcaggctttatcgtctcaaaaaaatcataagaatgattactgttttttccttcctgataccgatcagcgcctttttcagcaacttcaatcatttgctcggtcatttccagcaaagtttgtgatagcaatatctttcacctcaatgcctatcgtaccaaatttcactcacaaattcagccgatgcggtataccttctcaaacgcatacctgtgttcaggcgattgatacagctcatttatacaaatatgaagatctatgatttcttcttcgagcacacttaggcgatcgttctccgtttcccgcatctcagcctctaatgcatttacagaatgattcaggctttgctcagctcgcgttaattcatcttctatatcagaaagcatacggagaatatctgtcttgcatacataaccggacattcgtgtacctccctttccttgtctctcccggttaacattctttgctctcaaggctctttccttcctcatgacaaaactagaagcaaatcgccaaacaaacaggtattccacgaaaagctgaagttttcgacaaaaacacccgcaaaaattgtatgatcctcctcattaatgcaaacgatacttgtgaggaggtgccgtatgaaaacaagaccgaaaaaagccggccagcaaaaaaagactgaatcaaaggcaatcgattctttagataaaaaattaggcggcccgaaccgcccttctacgtaagaagcaaggaatttccttgcttctttattttttcagccactgctccaccgcaaaaagcgcatgaagctggcgctttttatgtaaataccagtctgtcaattcaatctgcttcggcaattcctcgcgcctaaagaacgttttctttatctttccatgaaaccaatctgttttcgttccgtctaatgagtggattaactcagggtagcatgtccttagcataggagatgttctttttgtaatcccgatcatcttttccatatcaaaacgggaacctgtgtgcggcactgtgtgcaaaaagtgataaaaagaggagaacaattctggcttgaacagcaattgagacagctgctttcccagccttatcctttcctccgcctttgaaaagcgtttcactgaaatgccgtaaaaaaacccatttgaggaaggaaaaataacggtgttaaaatgaaaccagtcacttaaataaaaaggaatcgtgtcaaaaacattctttttaaacgaaggattttgtataataggtgtttggatagtgttttgttcatttataatgagggcatacattagccgctccgtatttcgctcatgccaaaaacgggtccattcttccgacataaattgtgagacgccaaacacatgcagcagatgaaacagcggtttcccaactctttttgaccagtggtataaaagaagctgcggataggcatccgaaaaaataagccagttcgctctttcataggctaaaaagaaccatttttgctgtctctcacggagtccaagctgaaacagactgccttttaagtcagtcattgaccagccggcattacgagaaacgaaagaagccaaaagcgaccatttgatttccggatgacggtcgtaaaatgctttataagcatttgttcttgaaatgttatccgcgtttttcatttttgtctgccgctcaatccggctcagaagctttctgatggcctgttgttcttgcacgttcattcacttccgtcatgattagtttaataaggaggatgagaaagtgattcggtatcctaatggaaaaacatttcagccgaaacattcggtttcatcccaaaacagtcagaaaagggccccgtcttacagtaatcgcggaatgaccctcgaagatgacttaaacgaaacgaataagtattatctgacaaaccaaattgccgttatacacaaaaagccgacacctgttcaaattgtaaatgtccattatccaaaaagaagtgccgcagtgattaaagaagcttactttaaacaatcatcgacaacagactacaatgggatttacaaagggcggtatattgattttgaggcgaaagaaacgaaaaacaagacctctttccccctgcagaattttcatgaccatcaaatcgagcatatgaagcaggtaaaggctcaagacggtatttgttttgttattatatccgctttcgaccaggtttattttttggaagccgataagctgttttatttctgggacagaaaagaaaaaaacggcagaaaatcaattcgaaaagatgagttggaagaaacagcttatccgatttctcttggatacgcacccagaattgattatattagtattattgaacagctttatttttcgccatcatctggtgcgaaaggttgattaacgaaaggttgagatgttatgtcagatcaatttaacagccgtgaagctcgacgaaaagcgaacagcaaatcgagtccttcaccgaaaaaaggcaagaaacgaaaaaagggcggattgtttaaaaagacccttttcactttactcattctgtttgttttaggcgtagtcggcggtgctgttacatttgccgtcatggtttctgatgcgccgtcccttgatgaaagcaaattgaagacgccttattcatcaacgatttatgataaaaatggaaaagagatcgccgaagtcggcgccgaaaaacggacctacgtctcgatagatgaaattcccgatgttgtaaaagaagcctttatcgcgacagaagacgctcgtttttatgagcaccacgggattgaccctgtccgtatcggcggtgcattagttgccaactttaaagacggcttcggggctgaaggcggaagtacgatcacccagcaggtcgtcaaaaactcccttctttcacatcagaagacgttgaaacggaaggtgcaggaagtatggctttcgattcagctggagcgcaattactctaaagatgaaattttagaaatgtatttaaaccggatttatttttctcctagagcatacggaatcggaaaagcggcggaagaatttttcggcgttactgatttaagcaaattgactgtcgaacaggctgcgacgcttgcaggaatgccgcagagcccaacagcgtacaacccggtcaaaaacccggataaagcggaaaaacgacggaacatcgtactcagtctgatgaaaaagcaaggatttatttctgattctcaatataacaaagcgaaaaaagtggcagtgaaagacgaaggcgtcgtgtcacagaaggaatatgaaaaagcaagtacaaacaaatacagcgcatttgttgaagaggttatgaaggaaattgatgaaaaatctgatgtcgatccatctgctgacggattaaagatctatacgacattagatacaaaagcacaagataaactagatgaattaatggacggagacaccgtcggatttactgaaggcatgcagggcggtgtgacgcttctcgataccaaaaacggagaagtccgagcgattggtgcgggacgcaatcagcctgtcggaggctttaactatgctactcaaactaaggcacagcctggttcgaccataaaaccgattttggactacggaccagttattgaaaataagaaatggtccacatacgaacaaattgatgactcagcttatacgtattctaacggaaaaccgattcgtgattgggaccgcaaatatctagggcctatctcaatgcgttacgctctggcccaatcaagaaatatacctgctttaaaagcattccaggcagtcggtaaagatactgctgtagactttgcaaatggactcgggcttggtttaacaaaagataatgtaacagaggcctattctattggcggtttcggtgggaacgatggtgtttctcctctgacaatggcaggtgcatacagcgcgtttggaaataacggaacgtataatgaaccgcattttgtaaaatctatcgaatttaacgatggcacgaagcttgacttaacaccaaaatcaaaatcagccatgagtgattatactgcgtttatgattacagatatgctgaaaacagctgtgaagacaggtactggacagcttgcacaagtacctggtgtagaagttgcaggaaaaacaggaacgactaactttgatgataatgaagtcaaaaggtacaatatcgctagcggtggcgcccgagattcttggttcgttggctacacaccgcaatatacagctgccgtctggacgggaatgggagaaaacgaggctggaaagaaatcactttcagctgaagagcaaaaagttgcaaagcgcatcttcgcccagctcatcgccgatgtcgatgacggaagcggatcatttgagaagcctgacagcgtagtggaagccaccgtagaaaaaggttctaatccggcaaaactggcagggccaaatacgccaagcgataagaagctcacagagtactttgttaaaggcacagctccttctactgtttctaaaacatatgagaaagaagaaaaagaggaaacagctaaactgtctggtttaaacgtgaaatacgataaagacaatcaatctttaacgttaagctggaattacgacggagatgcgacctttgctgttaagcaatctgttgacggcggcagctactcggaaattcaaaacagctctgcaaaagaggcagttatttcgggtgtgcagccaggatctgtatacaaattcgaagtaacagccgtcagtgatgatggcaaaagtacagcttccacatcttatgaggtgccaaaagctgaagacgatgaagataaaaaagaccagcaacaaacggatgatgaaaaacaagatgatgagaagactcaggatgatacacaaactgatgattctcaaaaagatgacggtcagacggatcaagatcagacagatgattcaacaaacgatcaagacaaaaaacaagacaatacgaacaccaatccgtccgacaacaataaccaagaccaatcaaacgataatgataacgacaacagtaacaaccaggatacgtcggatggtgattcgaactctggtaagaatgattcaacaggttctgacacgaataaaaataaaacagacacatctaataaaacacaaacaaactcatcatccattgaaaaaacaaattaaacaaaaaagccgtcacctttggggtgatggcttttttggtacacaataaaaaacctcccgttttaacaggaggttttatcgattcatcgcatgatatttataaaaatgctttttcatttcggtaatcagctcatcaagctgaataaagcaatggtattgggtcggcttaagaagaataaattccactcgttcagcccaattaatcggctttgcgggatatgatttctccctcagttcttgccaatcgagcgatttcaccggctcacctgctgtccaatgtaacgaagccagcaaacacacaatgccctttaacatttcgttttggtcacatctcgattttcgtgtttgaaagactgggagaagtgatgctttgatgtcatcccacacttcaaataaaagcggaacgtatttcccgctgtcctcccatggcaaatcgccttgtaattccgtgcagaaatcaaaatacacgggattggtctgcaaggttttcttcatatccgaggaactcttctggccaagactgcgcaagtattgctcataggaagccaacacttcttttgcttgcgtcatcgtttcaccagtccttttttatccctcttctgcccttctctgcacaaagaaagcagcggacactccgcacagcgcggagattgggctttacagtgatatctgccgaagaaaataagccggtgatgcgtaacggaccaatcttctttgggaaccttgcgcatcagcgtcttttcaacttccagaaccgagtccttccaccggcaaatgcccaatcgtttgctgactctctccacatgggtatctacggctatggccggcacgccaaacgcaacggataccactacgtttgcggtctttctcccgacccctggcagtttgacaagctcatcgcggtctctcggcacttctccgccgtaatcttcaataatcattttactcagcttttgaatatttttcgctttattacgatataaaccgattgatttaatatcctgctgaagctcttccagcggaacagccaaatagtcttccggccgtttatatttttggaataatgttttggtcactctgtttacaagtgcatctgtacattgcgcagataaagcaacagccaccactaattcaaaaggattggaatgaaccagttcacactccgcatgaggaaacatgtcacctatcttgtctaaacagaattcaatttgttttagatttaacacgattgtcaccttttcactttattgttcaagccaattgtaaaaaggaacctgccttttatactctttttgcggttcattctgctttgcttgtacacgccggaatttttggctgtgtatttttgcctgctccacagttttaagcccatttttcttccattcaaacaaaatccggtcaatgtagcggaaactgagttttcctgatagtacagcctcttttaacgcgtgtttgatcagttgtgcgtcatgctgatcctggtcctgccagatcgccagcgtttcacactccaaaggcgataacggtcttgcgaactcttcctcaaaaatggtataaaggcttttttgttccccttctgcttttctttcctgtgtttgattctgtgcaagctgaatatactcgtacagcttgccccataaaggctgaagagaatatttctcaaatttgatgccgttttgatcctcgcattcttcaataaacagaaagcctttttgaataaacatccgcaatctgtttgtacattcttcaacagaaattgacataccttcctgcagctgattcggtgtaggaaaatatgatcctttttctaaatgcattttaatttttaacagcagaataagttctgtttcattaagcccaagctgtttataatgcgtgagcagaagattggggatggttgatgttccctgctcctgcatatcaataaattgctgttttttcatcgtcacacctcttactgtaaaggattgtgattgcccctttactgtaaaaagtctcccttgcaggagactcttttttgtttcatttgaatgtattacggatacagacggtttaacagtcttgggaacggaatcgtttcacgaacgtgaggcgctccgctgatccaagctactgtccgctctaatccaaggccgaagccggaatgaggaactgatccatattttctaagttcagcataccatttataagcgtcagaatccagtccatgttctttaagacgcgattccaaaagttccatatcgtgaatccgttcagacccgccgatgatttctccatagccttccggcgcaatcaagtcagcgcaaagcacaacgtcctcacggtcagaagccggctgcatatagaacggttttaaggacgtcggatagcgagtgatgaataccggtttgtcataatgttcagcaatcgctgtttcatgaggcgctccgaaatcatctccccactcgatatcgtcaaagcctttttctttcagaaattcaatcgcttcatcatacgtaattcttgggaacggggctttgatttgctcaagttttgacgtgtctcttcccaatgtgtttagttcaattttgcaatttttaagaactgattgcacgatgaaagaaacgtaattttcctgtacttgaaggttttcttcaaattctacaaacgccatttccggttcgatcatccagaattcgattaagtgacgctttgttttagacttttccgctctgaatgtcggtccgaaagagaatacttttcctaaagccattgccgcagcttccatgtagagctgtccgctttgagacagatatgcatcttcatcaaagtactttgtcgcaaagagttctgttgttccttcaggtgcgcttccagtcaaaatcggcggatccacttttacgaagccttcgttattaaagaattcgtaagtcgcgcgaatgatttcattacggattttcatgatcgcatgctggcgctttgaacgcagccataaatgtctgtgatccatcaaaaattccgttccgtgttcttttggtgtaattggataatcggtcgcttcgtgaatgacttcaatatctgtcacagcaagttcatatccaagcggagaacgctcgtcctctttgacaatcccttttatatagagcgacgtttcctgcgtcactgatttagctgtttggaaaatgctttcttccacttccgcttttactacgacaccctgaataaaaccggtaccgtcccgaagctgtaaaaacgcaattttcccgcttgaacgcttattagcgacccaagctccgatcgttacttcctcacctacgtgcttgtacacttggttgattgttgttttcaacatatttccctccaaaacaagaaagacattcggaagctcattgccccgcgaactcttttatcatcactttattatacccgctcttaactaaccgggtcaatgcagataaaaagcggcttttctgtcagccgctttttgatctgttagctatgtttttctacaaaacgcttgattctttcaatggcttcttcaagaagatctaacgatgttgcataagaaagacggacattctcaggagagccaaatccggatcctggaacaatcgcaactttttcctcctcgagaagcgctttaacaaattcatctacatctttgaaaccgcaagattgagctgcctcttttgcatttgggaacaagtaaaaagcaccttccggcttcacgcagctgaaccctgggatttctatgagctttgcatagatcgtatttaatctatgttcaaatgcttctctcatttcttccaatggctcagaaggcccgttataagcagcaatcgctccgtattgtgcgattgatgtcgggtttgacgtgctgtggcttgcaaggttcgtcatcgctttaataatgtcttcagagcctgccgcataaccgattctccagcctgtcatgctgtgggacttcgatacgccgtttataatgaccgtttgctctttcagtctgtctgacagctgtgcaatggaaacatgtttctttccgccgtatgtaagtttttcataaatttcatctgacacaatcaagatatcatgttcaaggcacacttcaccgagcgcagatagttcttcttccgtatacatgacaccagtcgggttgcttggagagttaataacgattgcttttgttttttccgtaattgcatttttcagctgctcaggcgaaattttgaagtgattttcctcaagcccttctacataaacaggctttccgccagcgagtttcacctgctccgggtagcttacccagtaaggcgttggaataataacttcatcttcttcatccaaaatcacttggaaaagggtatacagagcatgtttggcaccagtgcagacaataatttgagacggtttgtattcaatattctggtcgcgtttaaatttctctgcaatgctgtttttcagttcagccaaaccaccggaaggcgtgtatttcgtatggccctcgttcatcgaacgcacagcggcatcaataatatgctgcggtgtattgaagtcaggctcgcctgctcctaagccgatgacatcatggcctgcggctttcagttctttcgctttcgctgtgattgccagtgtggttgatggtgttaatgcggatactctttttgccagtttcaacttgaactccccctaattcgtcttaaggcgtgatatttttgagaatctttccagttgtaaagtccacataacttaaactgtattgcccttctttgtctaagtacgtcacttcccaaagcaggacgtttccttctcttgccagatgaacctctttttgctttgaaaccagcccttcatcctttatgattttcgccgctttgtcttcagagattccctctttcgcttcttttgagagaatttttgcttttttatcagcaggaacccagacatataatgcagtgccttttttatccgttccctttacaacataatatttttcttttccgacaaatgtttcgacttgatcaacatgggcgagatcggtttcttttttagcttcagcagctgctgcttcgtgcccctcttccttttgtgccatggctgatttataaatgcttgccgagacaagaagtactgctaaaaaaataataccaaaaatgacggtaaatattaatgctttttttctcatcttctcacctacgtacgataaatggtaaaaacggcttggtttttgttttcttcatccagcgcaaggccgaacatcagattgtctcttttcagtgtacgattcaatgtgtccacaattttatacagatcatcagaatgctctacattaattgttgaaagaatttcgattttactttccattttttcatcctccagtttgaacaaatattgttagtcatactccatttcaggacacgccatactagtatcacagagcgggaaatccgcttttaaataaaacaccatcctactcccacaccgcaaaagccgctttatgcggcttttattctttttcccctgcaacataagcttcaagctcgctgtcagtcatttcggatactgaggttgtcggcaaggcatcaagaaacagccggccgtaaccagcggttttaatccgtctgtccaatataataatcgttcccttgtctcccgcagaacgcagcaagcgtccgattccttgcctgaaggtcagcacagcttccggtaatgacactgtttgaaacggattctttccttttttgcgggcaagctcacattttgcagcatgaagcgggtgatcaggggaccggaatgggagcctcacgatcattactgtcgtcagctcatcaccagggaaatcaacgccttcccaaaaatgatttgttccgagcaggatcgcctgattggatgttttaaaagtcttcatcagtttgccgggacttccgcctgtaatcccttgtgccaagagctgaatgccggaagcactcatgttatgcttaagctcctggtgaacctttttcagcatatcatgggatgtaaacagcacaaggattttaggctgtttttcctttgccatcagttcgatataacgggctgtatcctgtataaattcaggttgccctgtatcctgaattgatttcatttcttttggaatcatcacctgcatacgctcatcgtaagaaaagggtgactcaattctcattgtccgcgggaaaaagtcactcagtcccagtcgttcaatcataaattgaaaagaaccttcgactgtaagagttgcagatgtcagcaccacactatttttgcgcgcgaaaaactgatcagccagaagttcaccaggttcaagaggctgtgcgtaaatggccactgcatttttcgcaccctttgcatctatttcaatccaaaccgcttcatcgtcatcagagccaaagaagagcttctgcaacgtctgacagtaatgctgcaagcctttcatgcttctttggtattcatcggctaaaaagacggttttgctcttcatgcccttcaaatgtttttccataagggatgactgcgcctcaaaaagctgctgcaaatgtgtcagcatggaacaaagcctctccgcaccatctgttaagatcgaccagcttttatcctggctttctttgttcaccttaaacactagacggtttaagtcttctttaggttttcttcgtttgacaaaagaatgtacagagctaaagaaagcatcactttctgcttgaacgtgctgaagccactcttccaattcgaaaaatgaatcaaccggcaggctgtttcgctggaatagctgtctcatcttttttagaagtccctgctccttcagagtgccgattctgctcaatttcgtatgcaattctatgtacgtggctcttttccctaaatgttcgcttgccgcacgttcaaaatggtgtgcttcatcaataataaatgtgccgctttcgggaagcctttttttatggctgccttcatcggtcagcaaaagagaatgattggtgatcaccaaatcggaacgcatagcaatctgtttggcccgctcgtaaaaaccgatcacatgctcactgcgacttcttttataggagtcatcgtcataagccaatctgtcccacagcaattttccgcctgaaggcaaattcagttccgctacatctcctgtatttgtctctgtcagccaaacaagaagctgtgcctttgtcagtacggcatcataattatcatcttcttcatgaagcacctgctcaaatttatacaggcataaataatgcgattgcccttttaaaatcgccgctgttaccggaaatggaaacagatcttggacaatcggcaaatcctttgtgagaatctgctgctgtaaaagcgtcgaatacgtgctgattatgaccggcttttttgatttcttggcaaaaagcgcagccggaataagatagccaatcgtttttccgatgcctggaggagcttcaatcagcgcatgctcacgattggcaaacgcatcagccacctctctcatcatcatcatttggccgtctcttttttcatacccaggcattaactctgacagcgctttttcatttcccgcttcccagctttcgatctcaaatgagaagttctcgtcctcatttatacgaacatcgatagcttcaggttctctgacagaaaacgaagaaaagcgcgtatagcccggtatctcggtatgtctgttttcattaatgaacatatccaacaaatgcgtcagatcactgatgaaatgctgcgaaagccttcttaactgctttaatgtcggataaggaagctgccgcagcttttcaaggatttccaaaaaaataagccctgtcacttcagcatcgctgtcagcccggtgcggctgatcatgccgcagctgaagctcctcgcttaattccgtcagcttatacccttcaaatcccggaaaaacaatgcgtgagagctcgacagtatcaagcacttcacaatctgggagctgaaagcccgccttatgtagctcatacttgacaaatccaaggtcaaaatggatattgtgggcgacaaaataagcgccgtcaagcaattggaatacttcttcagcaactgcttcaaatggctgttcattctcgaccatttgattagagattccagtaagctgctcaataaaagcagggattgatttatttggattaatgtattttgaaaaccgctcagtaatttgtccattttcgattacaaccgctgcgatttgtatgattttatcgcctttcttcggcgaattccctgttgtctctacatctataacaacgaaccgttgcttattcattaaaatggacacctcaattcttgcatacgacaaaagtgtaacacgttttgtacggaaatggagcggcaaaaccgttttactctcaaaatcttaaaagaaaacccccgataaagggggcttttcttctacaaaattgtacgggctggttcgttccccagcatttgttcaattttgttttgatcattcagaacagccactttcggctcatggcttgccgcttcttgatcagacatcattttgtaggaaataataatgaccttatctccttcctgcacaaggcgtgcggctgcaccgtttaagcatatgacgccgcttccccgtttaccaggaataatatacgtttcaagacgtgctccattattattattcacaatttgtactttttcattaggaagcattcccacagcatcaatgagatcttcatcaattgtaatgcttcccacatagttcaggtttgcttccgtaacagttgccctgtgaagtttgccgctcatcattgttcgatacatattatattctctccatttctcgaatatcaataatgatattatctattaaacgcgcttttgaaaaagcaactgcaacagcgagaatcatctttccagcaatttcattcacaggctcgagttccggataggaataaagctctacatagtctatggttccgctagtcgtttcaatgatatcttttgcagcttttatcaccgcttcaggatctctttcaccggcttggacaagttccgcacttgtttgaagggcccgatacagcttaggcgcttcttttctttcctcagctgttaagtatacattgcgagagcttttggctaagccgtcttcctctctgaccgtatcgacaggaaccaattcaatatccatgaagaagtcgctgattaacccatcaacaacagctacctgctgcgcatcttttaaaccgaaataggcacgagtcggcttgactagattgaaaagcttcgtcagtacgatcgcgaccccgtcaaaatgtccttctcttgagcgcccgcataacacgtctgtgcgtctttctacatgaatcgtgacattcttttcaccgggatacatatcatgagcatctggcgtaaaaagaatatcgactccggcgttttctgcaagagctgcatcccgctcaatatcgcgcggatatgcttcaaaatcttcattagggccgaattgtgcaggattcacaaaaatactcataataacggcgtcgttttcttgtcttgctttgtctgctaaggttaaatgcccctcatgcagaaaccccatcgtcggaacaaatccgattgacttgccctctgaatggtattgttttatggcttctttcagctgtgaaatatcagtaatctgtctcatcttattttcccccgtacaagccgtcaagcactgtctggttcatttgaaaggaatgcttttgttcagggaaagcacgatgtcttacatcctgaacatatccgctgattgctgtttcgatggtttcatcaatgcgcgtatattgctttacaaatttaggtgttctctcaacaccgtggccgataatatcatgataaacgagaacttgtccgtccgctttcacaccagccccgattccaatgaccggtatgcttagcgtctcggcaattttggctgtgagttctgccggcacacattccagcacaagcatcatagctcctgcttcttcgcattttatactgtcttctattaattttttggcgctttgttcgtctttgccctgtactttatagccgcccagtacgccgactgactgcggtgtcaaacctaagtgactgactactggaatgcctccaagcgtcaatgcgcgaatggattcaaacacgccttctccgccctcaagcttcagtgcgtcagctccgctttcctgaacgatagccgctgcatttttcagcgtatcttccttagacaggtgataagacataaacggcatatctgtcacaataaaggtattcggcgcaccccttttaacggcttttgtatgatggatcatgtccgcaactgtcacaccgacagttgaatcaaggccgaggacgaccattccaagtgaatcaccgactaaaatcatgtcaactcccgcttgttcagcaagtttagctgccggataatcataagcggtcagcatgacaatcggttcttcagactccttcatttttagaaaatccagttttgttttcatgttttctcctcctcatgtttagaggagatgatctgccgttttcttctgcaagccaaaaaaccttccgttacaacgagaaggattcttcactttctaaagttcggcgagtttcatccctctgtcccagtccttttttggatcaaggcagactgctgcaatgtctatctattttaataataggtgcagttcgcaggcgatactgcccaatggaagtataccaaaatcaacgggcttgtaccaacacattagcccaattcgatatcggcagaatagatttttttaatgccttcgttcgtttctaaaagcagaacgccttcatcatctatacctaacgccttaccgtaaaaggttccgtttaacgttctggctctcatattagtgccaataccgagcgcatagctttcccataaaagcttaatcggcgtaaatccgtgcgtcatataatcccggtaccgtttctcaaagcatagtaaaatatgctggatgacgccggcccgatcaattttttccccagcagcttggctgaggcttgtcgcgatgtccttcaattcatctggaaaatcattaggctgctggttaacgttaatgccgatcccaatgatcactgaacgtacgcggtcttcttcagcctgcatttccgttaggataccgactgttttttttccgttaatcaaaatatcatttggccatttaatatccgtttggatgcctgctgcctcttctattccctgcacaacagctactgcagcaagcagagtcagctgcggtgttttttggagcggaatgtcaggccgcaaaatcaggctcatccaaacaccgtttccttcttgagaatgccataccctagacattcggccccttccggctgtttgtttgtcagccaccacaagggtgccttccggtgcgttattattcgcgagctcatgagccgttttttgcgtgcttgaaagaacgtcatggtaaataagatgctggcccatcacttccgtttttaatccaaaacgaatttcgctttcactgagttttccgggttttttgatgagccgatatccttttcttctaacggcttctacttcataaccctctttccgaagctcttcaatatgcttccacacagcagttcttgaacagccgagagcatcactgattttttggccggaaataaattcattgccggcctgagaaaataattcaataaggtcttttcttaatgttgaccgcatgtcttcagccactcctctatgtgtttcttttgattggagagcttccctgtcacaacagcctgctcgatccactgtaattcttctgacacccattttccggccggccggtttcgaagcgcaagcaagtccttacccgtgatatcaagatccttaaggcttttgatcggcaggttttgataagcgtactgaatgtccttcagtttcttttcatccagtttttcgttttgccgaagctgcgatattttggccgctgagagcagtgcttttttcccagctctgtacattgtcattgcgtcaaggctctggccaaacgtatcggcaatgtgaatggcttccttgatcacttttcccgggagcttccaggctttcaggaaaaggggcgcgtctttcaaaactatgccaaggttaattaaaagagcagcccaaagctcctcacgggatgttaaagagaagaatggaaactcactcgttgaaatcaggttttctcgtttatgataaaaaccaggaagctcttcatacaatctcgtttgaatgagtgtttgaagcgcctggcgagaagctcttccctgcagcaatttctcaaactctatagtttttcgttcgactgaaacatgggagaggagtgatttttctttcgcaatggcttcttctgtttccggtgaaagcgtaaagccaagctggctcataaagcgtacggctctcagcatacgaagcgcatcctcttgaaatctatcctcaggctttccaacggttcgaatcactttctgatcaatatctttcttgccgccaaaataatcaagcaccttcccgtccgctgtcatggccatcgcattgatcgttaaatctctgcgttttagatcctcttctaatgatgagataaattgcacttctgacggtcttctgaaatcaacataatcagattcagtccggaatgtcgtgacttcataggtttcatcctcccagagcacaataatggtcccgtgctctttgcctacatcaacagtccgctgaaacagccgttctacttgatcaggtgccgcatctgtcgcgatatcgacatctccgatcgttcgtttcatatagctgtcacgaactgcgcccccgacaaaataagcctgatggcccgcttcgattaagatgcggagcacgggaagtgctttgataaaaactttttccatgtgatcactccggttctgctaaatcggcataaatctgttcatactggctgacaatttttttagaagaaaattcattttcaagcatctctattgccgcctttgtaaaacgattgcttagctgttcatcttctaaaatgctcatcgcgcgggctgttgcggccgtaacatcaccgacatccaccaaaaatccgctcacattgttttttataacctcagggataccgccaatgtttgttccaatacaaggcactccgcaagccatcgcttcaagcaggacaaggccaaagctttctttttcagatagcagcagcttcaaatcgctaatagaataaagatcttcaacacggtcttgatttccaagcattaagacttggtcttccaagccatattttctgataagctcgcaggctgtcgatttctccggaccgtctccgactaaaagcagcttcgctttcgttttgccagcgatattgcggaacacacggatgacatcctgcacgcgtttaacttttctgaagttggacacatggatgacgactttttcatctggtaaaattccatgtttctctttaattgccgctgtgtttttcttcagatacacgcgctcgtctataaagttataaatcgtttcaatttttttctccggtttaattaaatcgtatgtttcagccgcaagcgctgaggagacggccgtcaccctgtctgatgactcaatagcaaaacggatcagatcttttagagacggatcataacctaacaccgtgatatccgtgccatgcaaagtggtaacaatgccgatattgcgtttcagcatttgttttgcaagataggcgcaaacggcatgcgggagagcatagtgagcatggataatgtctaaattctcccgttccgccacctcagcgattttgcttgccaatgtcaaatcatacggaggatacttaaaaacagcatattgattaacctcaacttcatgaaaatgaatattgggatgatatgtattcagtctaaacggaatgcttgatgtgatgaaatggatttcatgtcccttttcagcaagctgcttccccagttctgtcgcaatgatacctgagcctccaacgctcggatagcatgtgattcctatttttagttttctcattgttcgcccccaagcacatcatgatcaagcatcagcatccgtttggaaaagaaaccttcggcatactccacgcccgcttctttaccgtaaagcttttctctcgcttcaacgatttcaatatacccattcgtcagaggagtagaaacggaatcctttgacgggataaactggcttttgtaggcgttgaggctttgtttctttgcctctattgtatccgagatatcaataacaaaatccggctgatgaaaaccatttatcatataatagtaaaccttgctgactttatgcgccggaaggcttttttcgtctttatatttatggattccggcggaaaagatcgcttcttccaccagtgcagccgcattgccgtgatccggatggcgatcctttttatacggcataaaaaccgcttttggccgacagattctgatgacagtgacaattgaccgaattgcctgatcactcattattaggccgcggtctggaagcgttagctgaattcttttatctgcgcctaatatgcgggctgcttcagctgcttcttctttacgcaaactgaccgtaccgttagaagagagttccgcttctgtcaaatcgcatatcattacttttttttcctgtttgacaaacttcgctattgtgccgcccattccgatctcgacatcatcactgtgggcgccaaaagcaagaacgtcagcattatacattcggctcttctccccgaagaaggtcacggaattcgaaaacaccttcatcaagtgtgcgcacaagaatttccgcagtacccatatttgtggcgagcggaatggaatacacatcacataaacggattaatgccgagacatccggttcatgcggctgcgcggtcagcgggtcgcgcaaaaaaatgacaagatcgagtgcattggcagcgatcagtgcaccgatttgctggtctccccctaaagggccggattgaaaacgttcaatttgaagacctgtcgcctcatgaattttcaaccctgtggttccggttgcgtatagatcatgattctttaaaatatcccgataggcagtcgtaaattgaaccatatcctgttttttcttgtcatgcgcgatcaaagcaattttcattgtttatcccccgtctaatcaatgatattttctaaaccatacacaagctgatcaatcttcatgacttgttcgactgacagtttaacgcctgacatgaaagaagcacggttataagaatcatggcgtatctgaagcgtttggccatccatgccgaacatgacctcctgatgcgcgatcagtcccggaagacggacgctgtgcaagcgaataccgttttgctccgctcctcttgctcctgggagaatttctttttcatccggatgtccttgctgcttttctttacggacttctgaaatcatttccgctgttttaagcgcagttccgcttggtgcgtcaagcttctggtcatgatgaagctcaataatctcaacatcctcaaaatagttggcagccatttttgaaaatttcatcatcagtatcgcaccgagcgcaaaatttggcgcgatgatggctccgatccctttttcttctgttaaagatgtgagctcttttaaatcagcttctgagaaaccggttgttccgacaactggacggactccgtgctctaatgcaatttttgtatgtacttttccgatttcgggcgttgttaaatcaatcaagacatccggttgtgtttctgtaaaacaggcatggatatctgtgtaaatgaaagcatctgactcaacaggcatcacatcagataatttttgctgatcgtatgtatggtctatggcccctacaaggtcaaaatgtggtgttcgttctgccaatttaacagcttcctgccccattcttccacgcggtcccgcaatgactaatttaattgtttcgtttgacatcttgatctcctctactttccttcttcttttctggtccagcgatctttatctcttgtattaaatttatgcatgactcggtcgtgagcttcctctaaagagatatcaagagagttggctaaacaaaccaatacaaatagcacatcgcctatttcctcttccatgcttttatcatcttcagtcgctttttttggtttttctccataacggtgattcacttctctggcaagctcgcccagttcttcagtcagcctcgccatcatggccagcgggctaaaatatccttctttaaattggcctatgtaacggtctacttcagcctgtatgtctttcattgttttatcactcactgaacgaaacctcctatcatcctcttacatgttagctaattcagatacgtttgacaaatgtttaagcacgtttgctgttttctttttcatccactataatataaacgctatctaatggaaggaaaaggggttttgtgtgatgcttggagaaattagattaaaaaacatattttttattttaatcggagcggcaattttttcatttggcttggttcatttcaatatgcagaacaatctggctgagggcggttttacaggtattacacttttgctttatgcccttttccacatcagcccctctatatcgaacctggtgttgaacattccgattttttttattggctggcgtttgctcggcaggacaatgtttgtttatacccttgtcggcactgtagccttgtctttgttcctcagcatctttcagcgatatgaaatccatatgccccttcagcacgacttagcgctcgccgctttatttgccggcgtattcatcggagccggactgggtattatttttaagttcggcggtacgacaggcggtgttgatatcatcgcacgtttagtgaataagtattttgggattccgatgggcagaacgatgtttgctttcgatgcctgcgtcatcattttgtctttgcttacttatctctcctataaagaagcgatgtatacgctggtagctgtatttgtagcggcaagattaatcgattttattcaggaaggcggatacgctgctaaaggcgctacgatcatctcttcgaaaaacgacctgattcagaaaaagattcttgaagaaatggaacggggcgtcaccattttgaaaggacaaggttcctacacaaaagaggatatagatgtactttattgtgtggtgccgaaaaatgaattggtgatgctgaaaagcgtgattaactccattgatccccatgcctttgtagcggtaagcgatgttcacgatgtgctcggagaaggatttacgcttgatgaaaataaaaatccgcttccgcgctgacatgtaatagaaaaaaggcggctgaccgccgcccctcatccttatttagggtagtccctttttttcagcttgtttttttccgccttgtactttctgtaaccgacataggtaagagcagtaatgatgatactgccggttgtaatgatcacccagagtaaagacggatcggcatcatcctcctccaccctgtcaaacacatttttcaggtcatgctgaagaagggaaagccgttcaagcttcgtgctctctgtcatttgctgaaattcctcttgctcaataacatctatatgttttccgactgtttcaagctgatcctctgatacatcgattgtaagactggggtaaatcaagtcatataaactgataaattcattccatttttcatgaaagcttgtgcttccattcttttggacatctcgcttcagttcagtaaaagcttccataatcggtttttccagtgagccccaaagcgggtcagaccgattgtcaaccgcatccatcagcattctgaactgcgcggctgctctgagtttttgtgtgtctgatgtatcagcttgctttaaactccgaaccatatcattatagcccaatgtgatttgacgaatttgggctcccgttagcatggggtcttgctgttttttctcagcggattttaatgttttttcaaaatactccaagacttgaagcgcctcttcatatttcgcctgtcgggtcatttgaaagactgtatcggataaatcattcaattcctcgaggcttccccgctctgcagccttggcatttccattataaaaaataagtgcaatcaacaaacagatcgtcagctttcgtttcatgcaggtccctcccactctctctccttacagaatatgaagaaagggacaaggatagaccaacattgtctttacatcagctcaagcttcgtttgcttttttgagaccacaagaaagtaagcaagcgcgattgaaaagatacttagccaaaatgttccgtatcctatttcagtcatataatcagaaagcatagagtattgcggcatcatatcaaacaagtagtcaatgacatcgttatgcagtgtccagactgcagcaattgcaagatgccaaaatgaaaaacgaaaatacggactgtataatacgccttgaactgccattgcaaaatgcgaagcaattagcatgtagccctcccacggcaagtcaccagttactgcaagcacaagaaaattcatagccaccgcccataggccatactttacgagggtaactagcgcaagcgcctctaaaagcggagcattccgtttcatgagaaaggcaagcagcacaaacagaaagaaaaacgttgctgtcggactgtccggaacaaaaatcaggaaacgggccggtgtctccaaaagctgcggcaagtaccaatagtagccgtaaaccgttcccagaaaattaatggctaagacaagaataagcatcggccgctgccctaatacatattgaaaccatttcacatcgaatcaactctcagtctgtaaaaataatatgtccatataaaaaagctgacgccgggtcagcttttgataataaaagtatatccttccatttgacaattcacaatacgttattttgcggttgtttcagaaataaattttgcaagttcttcgagctgcttatcatttcctttgaacacacccgccggcattttgcctttcccttctacagcgatttttttgatttcatccggtttcagcccgctgtcaaccaatgaaggcccggccgctcctccctgaaggttatccccatggcaagaaatacagccctgttccttaaaaaccttatatccttctgcattggtgtcaatgtcggcttcttttgtaattttcccctgttcttctgccttggcccagtcatgagtagcaactgactgccacgtcaaaaatacagcagcggaaatggccagaagcatcataccgacagcgaccggacgcttccacggccttctttctgtccctctgtctaggaatggagccaaaagcagggccccaaaagcgagacctggcataatcatggcgccgaccactgtaaagcttccggcggcgtattcatacttcaacagctggtataagaaaagaaaataccaatccggcagcggaatataaccagtatcagtcgggtccgccatccgctctaaaggcggctgatgcacaatcgtcaaaacgagaaaaccgatgagaaagacagctccaaccatccattcctttaacaagaaatttggccagaaagcctctgttttacccggatactccgaataatccttcggtatattcggctttttttcagccggtatccttgagtcgcctacaaatttcatccctttgccccggtgcatgtcatcccctcccttttattcgcagatcaagagtttaaagcggtcctgaaatcccctgcttccggatcataataaaatgtgcagccatcagcccgaacaatgcggcaggaagaaaaaatacatggatcgcaaaaaacctagtcagcgtttgggcgcctacaatatccggatgccctgcaaggagcgttttaacttgcgttccgatcaaaggcgtggcttcggcgatctgcagtccgacttttgttgcaaacagagccttcatatcccaaggaagcaagtagcctgtaaagccaagaccgagcataacaaaaaagatcagcacaccgacaatccagttcagctcgcgcggttttttatacgcgccttggaaaaagaccctcagcgtatgtaaaaacatcatcacaatgaccaggctcgcaccccagtggtgcatccccctgacaatctggccgaatgccacttcattttgcaaataatataccgattcccaggcatttttgatatcaggcacataatacatcgttaaaaacattccagataatacttggataacggttacaaaaaacgtcagtcccccaaagcaatacacaaacgcagagaaatgatgggcgggattcacatgttccggtacttcgtgatcggcaatatccctccacatcggtgtaatatcaagccgctcgtctacccagtcataaattttgttcagcatgtcacccttcccccttaggctttgcttttccaagatacaggaagccgtcttttacttcttgctcataatgatcaagaggcgcaagcggcggcgtgccagggacattggtgccgtccttttcatagagtccgtaatggcatggacaaaagaatttattcgggtttttaggatcactattccagttcaccgtacaccctaaatgcttacaaattggcgaaagtgctacaatttcatccccgtttttgaagacccaggctgatcttgactcttctgactcataccaggcatcgacttgattaattttaaaatcaaagcgctgcggctcttttgtcaactcatcaacgctgacaacctgaaccatatcctgcttccctgtcgattttaataccgggtcgagtgcgaagcgaaccataggcatgagcatactagccgccataaaacctcctacgcctgtgagcgtataattcaaaaattgacgtctggatatatcatgttttccgcccatctcttctcccccctctaagtcacccctgcaaactgactaaaatagaaaatattgcaataactctagacaccctcataatatatgaatctctcagcaaggtcaatatagccaaaatattgtttataaggaaatgtaagtgtttttataaagtgctccataactgtaacaaaacgttcaaaatttcagcagtgcgttcatccaatatttttctttttaaagagtcatttaaatgctctaatggaacagacgatgtaacaatcattttgcctaacgcatcctcagctctccaactttcgtcagatgtgagcaggacaacatgcggaaattccgttatcagctcttcccgcaaatccttaagcccttgaacggttatttcatttctatcaacatatgtataaggcggaagtaaatatacccgtccctttaactgcctttcaagttcttctgagagaagctgcgtaaactcgcctttctccgccgccattttaaaatggttattaacccttatgttaattaatggtatgacagcggtatcaatgtaatccttagcttgtaaatagtccttggcatcagtgattctccacctcatcgttctccccctttacggcaacaagccttgcaattcactgcaaggctggtcatattatgtgagctgatttaattggcgcgataattgttcaaatgcctctttatcatgacgatctaacgcgtcgtcaatgtcttttaataatttttctctttggaatgtggaaatagcgtgctctaaaatctgttccgccaatccctgatcttttttattctcaaaaaggtttttcggaatatgcgggttggactccagcaccgccgcatattcaggtgagctgtaagccgaacggaaattaagctggataaacaaatcctgctgtttatttaatctaatatcatgaaaagatttttccgcgtcggtagtcatgacattctctttatagaaccggaacggaacttcttcaacacaatgtgttgacattataatgcctctcgggcaaaattcagcctgctccacaaaatgaaccttctccatgagagaatcatggctcattaagtagttcaagatccaaacgcactctcggcgctttaactgataatggtttaaaaaccaacggataaaatcttttttctcattgacagaaacaggggtctgcatgtaattccctcctctatcgttcgtataatctatatacttatatgttccacatgaatggttaatattcctgcttatctagaaaattcatcctcgattcgcaaaatcgtttcttcaagctcttcattggctccgtccatttcaagaacctttttcaaaagcggcagcgcttctttttgaagaccttcttctaataggaagcttgcgtattcatataagaaatctctatcctcccggtaatgaagataggcagcctcaaaggattgttttgcttcctcgtattgctctaattcagtatatgcgcttgcaagataccaattgtatttaggatcttcttcaccgtagcttcgaacctcttgaataagatcaatgatctgatcataatcctcttctttgtgatacacggcaagaagtgtatgaagcgcctcgacaaagcccggatcaagcgcaagcgcctcctgaagcagcttcttcccctcttctgacttcccgattttcaaggccattttggcggcataaaggaaaagttctttgttatattcatcatatctgatcccctcttttgccgtttttaatgcctcttcatacattccttcagcttcatagcttttcgagagcggcatataaagtgaagtataagatggatcaagctcctttaaatcagacagctgcttaatagctgttttcacaagccccgcctgtaaggctgtaaaaccatagccgaaaatcgtattaggatcaggattctcatcgacagctttctcataccatggaatggcatcctcaaattcacctgaggcacttaacgattctgccagtctttgatggacattaacgcccccgatctcactctgctcctcagccgttgttttaaaatattgaaccgcttttgcataggctccctgagcaaagtaaagttctcccagtgcaaaatcaataacaggttcattgtccagaatggactttgcctggaaaagcttttgttcactgacttcgaataacccctgcatctgataaagatccgccataagcagcaaactttccggatatgatggatctgtttccggaatagtctccagcacagcgagggctttttcttcttcgtcaatatctattaaaagttcagcgtagaaattcgtcagttctgtttcatttggatataaatcatgtagatcactaatcagtgaaatggctttttctacatcgccccactcgtaataaagctgggctgcaatggctttatcttcatcatgcagctgtttttcagccttcgagagcgtgttgaggcctttttctgtttcacctgcttcaactaattttatggcttcttgaatcaatgtattcaaatcggaccggtcctttcttttcctatacaacatcaaccatacaaaaaaagctttatttgttcgggttaatcttatcataattcagacgaatgcccccggcaaataagatgcttctgtacggaagggaattattgagtcttattagtttaccaaaagatcttgagatagaaaatgaaaaaaggaagatcgccctctgtacagtaaagcagctctttgacctgccggcttgtaagtaaagcacatccccccttttcgtttttctatccgttctataagacaagctatgttttttcgcctcgaattatgatctgcataaaaaatcctgaagtaaaacttcaggattttttcgaaagcttatttaaatgctcgaagaaggttggataagaaacgtgaatggcatccgtgtgctcgatttcaatcggctcctccgttatacaggaagcaataccaagcatcattccgattcgatgatctccgtggctggacactgcagcgccgcctttcaacgtttgtttgccataaaccttcattccatctgctgtcggttcaatttcagcacccagcttgcgaagctcagaaacaacagtatcaatacggtttgtttctttcacttttagctctgccgcgtccttaataacggtggttccttccgcctgagtcgcaagaagcgcgatgatagggatctcatcaattaaacgcggaatgatatctcctccgatttcaactgcctttagagatgacgtttctataatcaaatctccataaggctctgcaccgctatcagcagatggtttgatttcaagttttgcccccatgttttgaaggacatcaataatacctgtccgagtcggatttaaacctacgtttttcaatacaattctgctgtttggaaccatcgcgccagcagcaaggaaaaacgcggctgaagaaatgtctccaggaacaaaaatatcagcagctgtcagtttctggccaccagcaatggaaacactcgtttgatcttcagaaagcttaacgccaaaagcagaaagcatccgctcagtgtggtcccgagatttatggggctctgttacagttgttgtgccctcagcctgtaatccggccagcaaaacagcagatttaatttgcgcgcttgcaacaggtgatacataatcaattccttttaatgaagcgccgctcactgacagcggtgtaaactctccgccggctctgccgtcgattttagcccccatttttttcaaaggctcagtcacacgcttcattgggcgtttcgcaatgctctcatctccggctaccgcgctgtaaaaaggacggcccgccaatattccgagcatcaggcgaatcgttgtacctgaatttccgacatctaaaaggctttctggctctttcagggcatcgattccttttccgtgaatcacgacatcgctgctgctttgctcaatgtgaacacccatttttctaaagcaatcgatcgtgctcagacaatctgctcccggcagaaagtttttaactgttgttgtgcctgccgctagcgcgccaaacataacagagcggtgagaaatggatttatcaccgggaatatgtatttctccatgtaaggtctgcaccttatctcgtttcattttttccacctcaatcagcataaaaagtttcatattccgcccgggcttcaatgcattgttctgcccttttgcggtcgtcatcagactgaaaactgatccttaaaatcccgttaatatcctctcgtgtttcgataatgcggatattcgtgatactgatgcgctccgcagctaagatcgctgttatctcggatattacacccggatgatcgggtacatccacatataaatcataaaatgcaggtatcgctcccttctgccgaagcggcagcccgtcgcgataatccttggctgttttaaaataacgaaatagattttccgcatcttcttgttctacatatgtacggatcttgtcaatttcacgaatccactcatcaaaacggtctaagattttatctttattatgtaataaaatatcccgccacattgccgggctgcttgatgcaatccttgtaatatctctgaacccgccggcagcaaaacgcttaacaagcggatacaggttttccgaatgatgggtttggtgaacaaggctagctgctacaatatgcggaaaatgactgattacgcttgtaacgccatcatgctcctctggcgacatttccacaaaatgggcattcgtccccttcagcaggttttttaactgttccacagcttgtttgtccgttttctggcctggcgttaaaatataaaatgcattttcaaacaggaactccttcgcagcggccactcctgatttatgtgaacccgccatcggatgccctccgacaaattgatagcggctaggcagcacttgatcagcgtaatcaaccactttttgctttgtgcttcctacatccgtaatcaaaagctcatgttcaattcctgaatgagccagctcttcaagcataaccagtgtttgttcaacaggtgtcgcaatgattactgtagctgcctctttcacaccgctaataaacgaatcagcacgatcgtctatcacgcctaattttaatgccgctaccgcctgttcatcagagatgtcgattccgataatccgtttgccgggatgattttttttgatggctagggcaatcgaaccgcctatcaatccgagaccggcgagcaatattgtatctttcatttgattcatacgtcatcacctggtttatagactaaagaggtgatatttgatcacctcttataaaatttcagctaaaatggcaagtatttcttcattttgctcttttgttccgatcgtaatccggagtgatgtcgggaaacctaatgcgtttcctgaccggacgatatagcctttttccagcagagcctgaaacagttcatcagcaggacgtttaaagtcaattaacacaaaatttgtctgtgaagggtagcactttaaaccatgagttttcgcaaaatcataatactgctgaaggcctgcattattttgctcgacacaggaagcaataaacgcttgatcatcaagtgctgcaatcgccgcagcctggcccagacggctggtattaaacggctctctcgccggctcaatctggcgaatcaggttctcgtcagcaattccgtatccgactctgagcgctgccagaccgtatgcctttgaaaatgtgcgcaaaatcatcaaattggaatacttgcttaagagcggcacggtttccgggtaatcctctgctgttacatattcataatatgcttcgtcaagaacgacaaggacacgagaaggaacgcgctccagaaatgcgagtaattctccttcagatgtataagtgccagtcggattattcgggctgcatatccaaacgacttgtgtctgttcgtcgatggcttctaacatggcgtctaaatcatgtgagccgtcgggacgaagtgcaatttcacgtacttcagcaccttcaataaccgcattatgtttatattgcggaaaagtgggggcagcagtaaccgtgtttgttttatcgtttaaaaatgcccggcagatgatctgtatgatttcatcagaaccgttgccgaaaataagtgatgtttcgctgacattgaggtgcttactgagccttgtccgcaaagcggcgctatacccgtccgggtaaagggctagctgttgaatctcatgatgaagcgcctcttttgcagcctctgaacagccgtaaggattctcgtttgaagcaagcttcacaactttatccaagccatattctgatttcactgcttcaatcggctttccaggctgataaggcttcagctgttttaaatgttctttgatacgcaaatcagtcacctcattttaaactgtacaagccgctaaacgccattgcataatcctcaaactcctgcagcgcctgatttctcgtttcagcgctgatgagccggtcctttaattcttctatttttctgacgagcgcacttcccactacgacaccgtcactaatttcattcatctttatgacctgttcacggtttgatataccgaaccctacagcaaccggaacagtgctgagattcttcacagtacgaatgaacgggtacacggatgaattgaactcattgcggacaccggtcacacccagagaagatacacagtagacgaacccctcggcttgttcaataatggttttcaaacggctttcgcttgtcggcgcaactaaagaaatatacgtcacctcatggcttttacattcctcttgaaggctgttgctttcttctaatggcagatccggaacaagcagaccgtcaatatgattttcccgcagtaaagcgaaaaagtattctttgttcaattgtaacacaggattataatacgtaaagaggataatcggaatattcactccgttttttttcatttctccgcctaattcgattgcctttacgatattcattccttgatcaagcgcccgctttgaagcccgctggatcaccggaccgtctgcaagcgggtcagagtatgcaacaccaagctccaatgctgtggcgcctgctttttggagtgacttcgccagttcaatcgaaacctcaggaactggatcgcccgccgtaataaacgggataaacaatttttctgatggttgaagatccaatttaaacatgggctttcacctcttcttccaatacattcattaatgtgttgacatccttgtctccccggcctgataaacagacgagaatgagttgaccgcgatccattcctttggcgagtttgaatgctttcgctaacgcatgggcagattcgattgccggcaaaatcccctctttttctgacaaaagctttaatgcatccaccgcttcttcatcggttatactgtcataagtgacacggccgcttttatgcaaatatgcatgctccggaccgattccaggatagtcgagaccggctgaaatagagtagggctcaataatttgcccgaactcatcctgaatgagataagtcaatgaaccgtgaataacccctacggttcctttcgaaatagtggcggcatgaagaggtgtatcaattccttttcctgctgcttcagcgccgatcagttcaacatcttcatttaaaaatgcctgaaacatacccatcgcattgcttcctccgcctacacatgccactactttatcaggcatagtgccttcaatacgtttcaactgatccttcgcttcctctccgatcattttttgaaattcacggaccacttgcggataaggatgcgggccgacaactgatccaatcatataaaagtgatcctcacaatgctgaacccagtaccggatcgcctcatttgtggcatccttcaatgttccgtttccgcttgttacaggcactacctccgctccaagaagcttcatgcggaaaacgttcagagactggcgggcaacatcctcttcacccataaacacagtacaggaaaagccgaatttggctgcaactgttgcagcggcaacaccatgctggccggcaccggtttcagcaatgattttcgttttgcccatttttttagcaagcagcgcttgacctagcgcattattgattttatgagaacctgtatggtttaaatcttctcgtttcaaatagattttcgcgccgcctaagtattcagtgactcgatcagcgtatgttaatgcagtcgggcgtccggaatagtcctttaacagcttataatactcttcacgaaaagcgggatcatccttgatttgtttaaatgctgtttgtatttcatctaacggctgcatgagtgtttccggaacaaactttccgccaaaatcaccgtatctgcctatttcattcggatatggatacatatcggttcatcctttcttctaaaagcctcatcagattctgatctttttgtccgtttttttcaattccgctggcaaggtcaattccttctggctgccatttcaataggcgtgtgatgctatccggattcacgccgccagcgataaagcagcgtttaccaatagccgcctgctgatattccggcacacattcccaagaaaatgcaacaccagttccgcctctagacccttttacagatgaatcaatcacaaagccgtcaacattatctttaaagcgggctatttcttgagttgtgttatcttgatggtgaagcgccttccatatttcacagcctgtcagcttgcgaagagcagcagcatccgccggtttttcatcaccgtgaagctgaatgacgtcgagcttcaagctcttggcaatacgtgacatcgtctctattgattcattaacaaaaacacctgcaacctgtttttcgacacgaacttggttcagccattttttcacatcttccggagatacttttcgtttgctttcagcaaaaataaatcctaggtaatcagcctgtgattccgccgcaagctgcaaatcctttagtgaccgaataccgcaatattttaatgccggtttcttcacaacctcactccctaaacaaagcatggattgctttacgctgagaagtttgtctcatcaatgattcaccgataagtacagctcgcgccccatgttcattgacaaatgttaaatgttctaaagaaccgattccgctttcgctgacaagcaaggattctttcggaacgagagatgcgatttgttctgtctgctttacagatgtttcaaacgtttttaggtttcgattatttacgccgagaatgtcgggtgtgaacactttcaatatttgttctagcgttgatgcatcatgaacctccactaacacgtccatccccttttcacctgcttcaagatataattcatgaaggtgtaagggatcaagcacctcgccgattaacaatatggcatccgctccgattcttcttgattcctctacttgaagagaatcaataataaaatcttttctaagtacaggaatcgaaacagcacgctttacgtctgataaatagctgttttccccttgaaaaaacggggtgtctgttaaaacggaaatcgcatctgccttcgcagcctcatagtcttttgcaatctgcacaggtacaaaatcctctttaataagcccttttgacggcgatgctttcttcacttcggcaatcaacccgataaaccgattcgggcttgccagcgcctccttaaatgaacgtttctcgaaaggctgctctaccggcagaaccagtgttttcacttcttctttcttttgtttgatgattttttcaagcatagatctcttcctctttctgctttagtcgttcaagctgcgcggcagcgcctccgcttgtaatcgtctctaacgccagctccgttccttccttcagtgaggcggtaattcccgccgtgtaaatcgcagcacccgcattaaaagccgtaatagataaagcggaactgctgcttttattttcaaaaatattctgaatgagataagcgctctctttcggagactgcacctgtaaatcttcaagtctgccatttgtgaaaccgaaatcttcgggtgaaacggtatactcccggcgctctccgtcctttaattcaatcacgtcggtcggtgctgtaattgaaagctcatctaaaccgtcacggcttgatacaaacataacgtgcttcggctgaaacgtctccagtgcgcttgccatcagtccagctttttcaacagaatagaccccaatcacctgacgcttcgcctgtaaaggattgctgagcggcccaagcagattaaataccgttctgaaacctagctcttttctagtacctgctacatgtttcatagacgaatggtaaagcggcgcaaaaagaaatcccatgttgtttgtttcaatgctgcttttgaccttttcgggagtggtttgaatagaaacctctagctcctctaaaacatcagcgcttccgcttttagaagagacagagcgattgccatgcttagcgattttcgcaccagctgccgaggcaacaattgccgaggccgttgagatattaaaagtggaaataccgtctccccctgttccgcatgtatcaacaatatcaggaagtccatcgactgtaagagcgtgtgcccgcattgccttcacaaaacccgcaagctcttctggcgtctccccccgatgagcaagaattgacaatatccccccatttcagaaggagtcatttccgctgccatcatcatattcatcagcgtttcagcctcaccggcagtaagggtttttccgtcaacgcacaattgtagaaatctgttcatcagctttatcctccttgctatgaaacatgtcttctgcaatatgaatcgttttcagcagcgcaccggctttattacagctttcttcgtattcggcttccggaacagaatcagcaacaatgccagcacctgcctgtatcgatgcaacaccgttctttacactcatcgtgcgaatcgtaatacaagagtcgatattcccgtcaaacccaatgtaggcaatacaccctccgtatgtctctctcggtgttggctcgagttcttgcaaaagctgcatggcacggattttgggtgcgcctgttaaagtccccgccgggaaagcagacatcagtgcatcgacaggatgaaccccttttttcaatcggcctgtaaccaccgagataatgtgcatgacatgtgaaaaggaaacaatttttgtgaactccggcacagaaacagaaccatactctgctactctgccgatatcgtttcgggcaagatcaacgagcatgtaatgctccgctttttctttttcatccttcatgagctcaaccttcagtctctcatcttcagctttgtctgcaccgcgttttctcgtaccggcaatcggatggatttctaagtgcccgtcttgaacgtgtattaaccgttccggagagctgccgactatttctctgtctagcagtttcatataatacatatacggcgaaggattgacgatcctaagcactcggtataactcaaaagcatctgcttttatcggcacctcaaatttttgtgataaaacaccctggaagatatcgcctgcttttatatagcttttgattttttctacatcagccataaaagccgatttttcataattagaagatactgtctcaaagctgggtgtcttgtatgaatcagcagaaagaaacagctcttttatgtttttttggtccatcattttttcaatgagattttgaagctccagatgattttgatggaatacatccattttttcgttttttgtttcctctccagtgagccttgcatattggataaagtggacgtttttggtttcatgatcatacgcaattaatgtccggcaaacaaacagcatacacttttccatgtctgtttctttggtatgcgaaggaacagaaggctcaatcagcgggatcatatcatagcttaagtacccgacagctccgccgacaaaaggaatgccaagctcaggtgttttgattttgtatgtggtattcatccagttcagcacttcttttagttcatttcctgtgtaaagagatttgctgtcctgatcagcggccgaaaaacggccctgctcttctttaattgtgagaaatggattcaggccgataaacgaatatctggaccaagtggatgtatcgtccttgctttcaagaagatacgtaatctccctgtcaagcttctctatcatttgaatgggtgtcagtgtatcgactgtgaaggtctccacaatcggtatcgtgtggtgggacaagctgtcctctaaaaatgcggaaatgtttgattggaaattcattgctctcactccttatggcaaggagaatgagaagatggcatgagaggataaaatactatataacaaataaacccaaaagaaagacttcttttgggtagaataaacataatgtctcagctcaactaaactcattctctgctaccctattctctaactcaactcattctaattgctttatacacactcttgtgtatttctaagctgttcttatcgtattacaattcagtattttttgtcaatgataaatcgggcctcaatacgacagctttttctaaatatacatgtctgatctgatcctgagggacatctgtctggaccgtcatcatgactcttatgcactttttcagaccgcctgttacgtccatttcctgcatacatgttaccggtacatactgccatcctgaaagctcgcgaacagcttttgccgggaaaacagcgtgcaaatcaggtgtagccgacagaagcatttgaacaacatcttccggttttgtatgattttcttctatgattttctctaacagctgtttagttttttgtaaaatttcttcttcagtatcccgttcaactgtagttgctccgcgaattccgcgaatcatcatgatgtctcctccaatcgccatttgttcagccagctctcaagttcatttctggaaaatgtatgatcagcaactttccctaattcgttgagcacaataaactgaatcttcccgccacgggttttcttatcattcatcatacggttcaagagaaccgaagtttccgtctcttttctgatttgacttggataacccaggctttttagccagctgaccaaacgttttctgtccatttcacagcctacagtcttttcgcttatatataaagcaaactgcattccgagggctacggcatcaccgtgagtgatctgcccatatccatattccgcctcaacggcatggccgagcgtatgcccaaagtttaagtaagctcttatcccctcttctttttcatcctgctgaacgacagacgctttaattgaaatgcctttaaaaatcatgtcattcagctgatcattagtgatatcacgcagtgagtggatattcagcagctcctccagaaacgctctgtcatagataaaagcgtgtttaatcacttctgccattccggacctaagctctttttcaggcagagaacgcaggaaatctgtatcatagagcacggctttcggctgataaaacgcaccgattagattttttccaagcggatggttcacggctacttttcctccgactgcgctgtcatgcgccaagagcgtcgtaggcatttggatgaaatcaatgccgcgcataaaagtggcagccacaaaaccggcaagatcccctacaacaccgccaccgaatgcgatgatgcatgaggagcgatccatatgaaaacgaatcgcttcactctgcaattttgtgtacatgtccatggattttgcctgctctccactcggtaccgtcacttttttcacaggccatttttcttgcagcaaatggagcatttcatcaccatacaggcggtccacttcttcatccgtgacaaacataatccttgttaaaggcctgtttaaagaggttaatagttcgcaagccttttttctgataccttgtccgataaaaacaggatatgacgaggaagcagtttgaacatgcagtgtcttcattaaaattccctcgacagttttctcatattctccacattttctctaatgcggtcaatttgatctaatccgaattgttcaacgactgcgttcgcaatttcccaagcgacagccgcttcagcgactacacttgccgcaggaacagcacagctgtctgaacgttcaatgctggcagaaaacggttctttcgtttcaatatcgacacttttcagcggtttatacaaagtcggaatcggcttcatgactccgcggacaacaatcggcatccctgtcgtcatgccgccttccagtccgccaagtctgttagtagcacgggtgtatcctttttcctcgtcccaaatgatctcgtcatggacttcgcttccatttcgccctgctgcctcaaatccgatgccgaattccacacctttaaatgcgttaattgacagaacagcggcagcaagcttgctatccagcttgcggtcataatggacatagctgcccacgcctaccggcattccctcgacaatgacttctactattccgccgatggaatctccgtttgcctttgcttcatcaatggcagccatcatttttttgcctgcctcttcatcgtagcatctgacaggagactcttccgttacacgctgcaagtcttcaattgacgtatactctgttttttcagctttaacagcgccaatttgcaacacgtggcccgccaccttaatgccaagctcagaaagaatctttttagctacagcccctgccgccactctgacagttgtttcccttgctgaagaacgctcaagcacatttctcatatcacgatgattatatttaattgcaccgtttaagtcagcgtgcccaggtctcggtctggaaatctggcgcttcatttccttttcttcatcttctgtaatcggagcggcgcccatgatttttgtccaatgcttccaatcgttattttcaactacgagagcaattggcgaaccgagtgtacgtgcatggcgcaccccgctcataattttggcctggtctttttcgatctgcatgcggcggccgcggccgtgtcctttttggcgtctggcaagctcaaaattgatatcttcctccgttatgtaaagcccggcaggtacaccctcaataatggttgtcagttgggggccgtgtgattctccggctgttaaatatctcatgacttcttctcccttcatcgcattaacgcttttaagtaagactactataacatatttttcagcaaaaagtcagtctatcttttttgataaaagaatgtatcggctgggactaggccaaatttctcgggattgaagatttgctcggtgctgccgacaaaaagaactccattcttcttcaagctatgtgccatttttaaatacagctcttccttcgcgctttctgtaaaataaataaatacattgcggcacacgattaagtcaaagtcttgttcataacgatccgccagcaaattgtgctttttgaatgtaatattctttttgatttccgttttcacttcataacttctatttgcgttttgcgtaaaataacgatctttcacagatagcggcacttcctgtaaagaccgctcctgataaacgccttttttcgctttttccaatgctttttcatcaatatccgtcgctaaaatctgatagcccggaagacctttttgctggtccaaaagcatggcaagcgtgtatggctcctcccccgttgagcaggcggcactccaaatttttaaaggcctagaggtcttgattaacggcagaattgcagtctcaagaacttcccatcttttataattacgataaaattctgaaacattgatcgtcattctgtccaatgtttcatttaagagagcttgatccttttccaatgccgcagcaaagtccttaaagctttggaacccctttttctcataaagtgacgttagccttctcttcatttgtgcttctttatatagtgttaaatcgactccggttaattgtttccatttcgttgtaaatacgctgtatgtatccatctctactctcccagtctcgctgtctttttgtcctagtatagcttgttttatcaggaaattgtattgtttcaataaaaaaatcagcttttcagctgattttagatcgttgggaaaggcagaggtctgatgcacactgccattcaaccctttattcactttaatgtaaacctttacaaaacagaacaaaaaccggcggcgttatatgttgccggctctgttgcttattttcacaatgattaatagatccagcctgccataagctgctgatatgatactaattcttcattcttaaagaaaatgttaatctcgcgttctgcactttcgagagaatcagagccgtggatgatgttttttccgacaaacatgccataatccccacgaatcgtaccaggtaaagcttctttagggtttgttttcccgatcagctgtctcgtcacttcaatgacattttcgccttcccacaccattgcgaatacaggtcctgaagtaataaactcaacgagctctccgaagaaaggcttaccttgatgttcggcgtagtgtttctcagccatttgttcagtcactctcattaacttggcgccagctaattgtaagcccttacgttcgaatctagataaaatgtccccaatgagctgacgttggacaccgtctggtttcaccatgataaaagtcttttccatcatattctccaccccatcattatgtatgtataggctttcacactgcacaccgaaatcgtaacatctttctgataattaatcaatccggggcggagaaatttcttaatatctacaaaaattaaaattttcttttaccgatatattttgcgatggctgcaagagacgagcgtgcgcgccctcgaggaagcgtgtttaatttctgaaaagctttctgcagatacatttcgcttactgccatagatgcttcaattgcatctgtttttttgatttcttcaatgattggttcaagctgttcctgcgttgtctcactgttaatcaatttaagctggttttttaatgcaggatttttcagggcatacagcactggcaatgtgacgtttccttgaagcaaatctcctcctacgggtttacccagctcttcctcagttgaagtaaaatcaagaatatcatcaataatctgataagacatgccgacgtaatacccaaaccagtacaatgccttatgaatcttctcatcagctccagacgcaatggcaccaagctggcagctgaccgcgatcaagagagctgtttttcttttgatacggcggagatacgttctgagattttgttccatgttgtatttgtctttgatctgctcaatttcccctagacaaacttcaacgatcgtctgtgacaaaatcctatgggctttcggttcgttaattctcgtcatcatttcaagagatcccgcaagcatataatcgcctgtgtacatcgcaatacgattgtcccactttgctttgattgtcggttttcctcggcgaagctctgcatcatcaatgacatcatcatgaaccaaagatgccatgtgaatcatttccagagtgacggcgacatatttaatcttattaatatcataatcgccaaacatgccagaaagcagcacgaaaacaggccgaatacgtttccctccggcctgcagcaggtgaagacctgcctcgcttaaaagcgggtaatcggaacgtacggtttgttcaagttctctttcgattacatcaatatcgtcatttaaaaaagagtaggccattttaaatttcatatcattcacccaaacatctgtgttttcatttccatccgatatgcgtggcagcgactccgccagtaaacgaatgatatttaacatttttcaggcccgcctcttcaaacaggcctgccagttccttcattccagggaaatctctggctgattcttgaagccaagaatattctttatagctcttcgcaaacagtttcccgaaaaacggcataatatacttaaagtacataaagtaagcctgtctgaatccgaacatttccggctgggacgtttccagacataccacctgcccgcccggcttcactacacgtctcatctctttcagtacagtcaagtaatcagggacattgcggagtccgaagccaatggtgacataatcaaatgtatcatcatcaaaaggaagctccatcgcatttccgtgcagcagttcaatttggctgaatccgccgtcttttactttctgctcgccgacactcagcatattttcactgaaatccaagcccttgatctcgccgcttttgcctgccgcttttgcaagagcgatcgtccagtcagccgttccgcagcagacatcaagtgcttttgcgccttcctttacattcatgatgcgcatcgttttgtcgcgccattttttatgctgctgaaaactgatgacagagttcatttggtcataatttttatatattttttcaaatactccgtgtacgcgctgttcttttgagtcctgcataatggtttacccttcttccactttctgatgataggtttgatcttggctgattgtcttcagacggtttattaaaatgttctgaataggtgaatttagaggcagaagtgactcaatgctgtttttcgcttttttaaaacaatcttctaatatctcttcttttgtttttcccagctgtataaaactgccgatcacatccagaaatgcatcatttccgttcataagccgcttaaatacaaaaaaatcactcgacagctttttccagcgcgggaggttgaagtgttccgccacacgatggaataaagctgattcaacgatgccgacactttcgaaaaaatcgttttcgtccttgaaagaacggtcatacagacgaattttatgttcgttgatttctttaatggctgtagcaagcgtccgaatcatgtagatatccttcatttcagatagtaaagagtagtacagcccgctgaaataatcgcccgcgagaacagtcaattggcggtttttgttttcgtctcgttttatgactctagctgtcgtcacttcatcatgggtatcaagggcgctttgtacaagcatcgctgttacaatataattttctctgtcgttgttttttatgtcggcttcttcaaataaagcatgaaaaagaagaagcttatcctcatcaattttcggcgcagaaatatgcttcgctaaataaggatgagacagcttttgttttaatttcgtgttcagattggctaaagttccgtagatgtcttgcaaaaatatcacccttgtccccaaattcacatttatttcttaatctatgtatgagttttatcttttcattcgcttacgcaggtatcattatagcataaaaaaaagaaattggctgtatcctcccgctgtttgcgagcatttgcttttaacagcggggacagccagcttattttttttcgcttttcatttctccgtacgcggtttgaatcagtgcctctcctctgactttaatggcagaagtatgctctgtaaactgagcgatgatcacttctcccttgtcgagtttttcggaatggtgaaactttgtgtctgttcctcttgtcaggccgatcacattcactccgtcctcaacggctttaatgacgacaaaatcacttgaatgcttttggttcatttatagcaccctctatctttattagtcctggcgtttaatatgttccaatacttctgcacgggcagcggcatcatctttaaaaacgcctctgactgctgaagtcacagttttcgcacccggttttcttacaccgcgcatcgtcatgcacatgtgttccgcttcaaccactaccattacgccatgcggatcaagcgtttctacgatgctttctgcaattgtagaagtgatgcgttcctgaagctgcgggcgctttgcaacggcttcaacggcacgtgccagtttgctgagtcctgtgacctttccgcctcgcgggatatatgcaacatgtgcttttccataaaagggaacaaggtgatgctcacacatagaatgaaacgctatatcttttacaagaacaagctcctcatggttttcaccgaagatagtctggaaatgttcttttggatcttcattcaagccggagaatacttcggcatacatctttgcgactcttttcggagtatcaagaagcccttctctattcgggtcttctccgatcgcttctaaaatttgacgaacagcttgttcgatttgctctttattaacttctttcatgttctatgtcctccaccaatgaatacatttaatttcgattctagcacatatgccccgctaaaagcaaagtgaatgccctgtcaggaagcccatgctcttgaaatatgaaaagccccttagaaaggggcttttctgtgaagaaataaagtgtatgtaagctagatgcatacacgatctatattcacaattattttccggcaactgcgtctttaagcgctttacctggtttgaaagcaggtactttgcttgctggaatttcgatttcttcacctgtttgaggattgcgtcctttacgtgcagaacgttcacgcacctcgaagttaccaaaaccgatcagttggattttatcaccgtttttaagtgcatctaagatcgtatcaaaaacagagtcaactgcttttgtagcgtcttttttagacaattcgcttgcttctgcaaccgcattgataagttctgttttgttcatgcctttcacctcctcccaaaaggatacattcagttcgtttattatcatttcttcacagttcagtctgattctaaacctgtctcagaaaaaaatgagagcaagtaagagaaagacaattaaacggctttttaagaaaaactgcactctgaggaatgtttgtccaacaaagtgaagaatttctgtatgtagagtaacacatataaaaagccatatcaagcattttaaagcgtcaatcccttgctcgtcaaggatttaaggtgatttaccgaacgaatattcctttttttccttttttcatcctattccttgatccttttccattattaagagcaaagaaaaaagacctcccattctataaagaggtctaccggtattacaggatgatggcgattaagccgccagagccttcgtttatgattctttctaatgtttcttttaatttataccgtgcgttttcaggcatcaatgacagctttgcctgaatcccttctctcacaattgagctcagcgaccttccgaagatatcggaattccagatggagagcggatcatcctcaaagtcctgcattaaatagcgtacaagctcttcactttgtttttccgttccgataatcggggcgaattcgctttcgacatctactttgatcatatggatcgacggagcgacagctttcagcctcacaccgaatcgcgagccctgccttataatttccggctcatcgagactcatatcagctaaagcaggcgctgcaatgccgtatcccgtctgtttgaccatttttaaggcatcagacacttgatcatattctgttttcgcatgggcgaagtcttgcatgagctcaagcagatggtctcttcctctgatttcgacgcccacaacttcttttaggatttgatcatatagatgatcaggcgcgtacaaatcaatttctgccaccccttggcccagctcaattccggctaatccggcactttcaatgaattcaaactcgctgaattggccgacaaccctgtctacgtcccggagccgtttaatatccttaaccgtttccttcacggactcctgatagctttcacgcaaccaatggttttctttcagcaccattacccagcttgggagattgacattcacttctagcaccggaaactcgtagagggcctctctgagcacactcagcacatctgattcccgcatgctctctacactcattgccaataccgggatatcatatttttcgcttaaatcctggcgcatggcttccgtttccgggtgatacggcctgactgagttgatgaccataataaaaggtttgccaacctctttcagctcttcaatgactctttcttcagcctctatatagtcacttctggcgatatctccaatggtgccgtctgtcgtaatgacaactccgatggtcgagtgttcttgaatgacttttcgtgtgccgatttcagcagcctcatgaaatgggatcggttcttcgtaccaaggcgtattgatcatccgcggcccgttttcatcttcatatcctttagcgccgggcactgtgtaacctacacaatctactaatcttatattcacatcgagtccgtctgacacatgaacagacatcgcctgattcggaacaaatttaggctctgtagtcataatggttttgccggctgcgctctgcggcagttcatcctgcgctcgggcccggtctgcttcgttactgatattcgggagcaccacaagctccataaattttttaatgaacgtggattttcctgtacggacagcacctacgactcctaagtatatatcgcctcctgttcgttcagcgatatccttgaaaatatcgaccttttccaagtgatcccctcccggacttcctatccttttcaattttattaagctctttcaatcaaacacaggacactatatgtgtatgacgttgtcctatttgaatatgacatctttagaaaatttctcatcctcaatctattaatataaaaaaacctttctccctatttgtatgcaagggagaaaggttcattcctttttcatatcattttctaaaaaaacaggttcctgtttgtcatttaccgtatattttacagaaaacgcggggacaaagggggtttcatgccaaatcatatcctggatttcagtcccgggtttaaacgtttttttgctttttttgaggcaagaagccagctcagtccggtaatcggcatatatttctccgtctccgtcaatcataagcggcaaggaattccctgagattgggcttgtcactgtaagagagctgccatccccaagcttcttctcatcgagtgtaaataaatcacgagatagcacatccttgtaaggcggatattgatgctcctgacgatacatttggatgcgcaatttcacatcgcgaattttttctgccatctttagatcaattaatttaacagtcggatcgttctctacgtcaacaagcacgtattgatagtctcccccgctttcaaatgccgtacttggaggttcagctatgtatcttggcgctaaccggttaaagtctatcggatatttttgatatagcggtgtcgacatatctttggtttgaataggaagcagccctccatttgccttttgaaattcatcaacagcagattgaacctgctttagctggtcttgataaggaatggcatgcacactgcttttccgttcatttggatataaacatccggataaaaacacgactgccgcaaaaatgattgcgcacttcagtttacccatacagcacttccttttacagctttattcattgacagggccgctaaaaaccacgacaaacacaataattccagatatgagcatacacatgtatgcgaatgatgaaatcgcaatcttcaaaaaacggttttggcacttaaagcggcttaaatagatggaagctacagccagaaacatcagacccatggaccctagagcaaaccacattttcatcaatgccagattcaatgacgtgcgcctccccgatatgtaagatataagcgttatattatattttaatatacagcgccggaaaagatcaaccagattttccatccattgatagaacaaaaaaactgaagcaaagagggggaccttcgcttcagtcaacttgactatattcacctgcacgtttaagaaacactctcttggacttcgatgctatagtatgcgacttggcatacagatgcatcctctattgcctaaatcggcaaaatgtttcaggagatcccaagacttgggtgttcttctgtttttcgggctttcgttcaattaagatatgcgattcaccatttgattgacacttttacttcacttgattttcaaacgtatttaccaaatcctccatctcgtgggttttccctctcgccattaaagattcaacagcggtttccactttttgtccgttgaataggacctgatggagagcttctgtaatcggcattttaacatcatatttcttcgaaagctgataagccgctttcgtcgtgcggacgccttcgactaccattcccatctcttcaagaacatcttcaagcttgtacccttttccgagcaaattgcccgcacgccagtttctggaatgaacacttgtgcacgtcacaatcagatcgcctactcctgtcaatccagagaacgtcaagggatttccgcccattttcgttccgagtctcgcgatttcggcaagtccgcgtgtaatcaaagcagctttggcattgtcaccgtaccctaaaccatctgtaattcctgcagcaagggcaataatattttttaaagcccctccgatttcaactccgataatgtcaggatttgtgtacacccgaaaattgtgattaataaatagatcctgcacctcttctgctgccctcatgctctttgaagatgcagtaacagttgtggggtgccgcagccctacttcttccgcatgactcgggccggaaaggacaacgatatcttttctgacatcactcgggagctcaatttccataatttcagaaatgcgcagaagtgaatctggctcaatacccttgctgacatgaacaaagactgcctttttcgttataaaagggacagcctgtctcagcacttcccgaattgcttttgtcgggaccgcaacgataatgacatctgcgtctgaaacagcctctttcatatctgttgttcctttaatggatgtagacagcttaacattcggcaaataatctttgttttcatgcaactcattaatttgatgaattaaatctgcacggtgagcccacacacacacttcatttccattatcagttagaactaaagccagtgctgttccccaactccccgctccaagcattgtgacttttttcatgtttgattcacacctttttattttctagctcttgcaaatattttgattggtgtcccctcaaaaccgaacgcgtctctgattcggttttctaaaaaccgttcgtatgaaaaatgcatcagttccggatcgtttacaaacacaacgaagcttggcggctttaccgacacttgagtcgcatagtaaattttcaaacgagaaccgttatgagtcggtgtcggattcattgccacagcgtccatgatgacatcatttaagacgtttgtttgaactcgaagtgaatgattttcactagctttgataatcgcaggcatcagagtatggatccgttttttcgttaaggcagacataaataggattggcgcataatccagaaattgaaaatgatcgcgaatattttcttcaaattctttcatcgtgctctcatctttgtcaacagcatcccatttgtttacgacgatgacgacggccttgcccgcttcgtgtgcataaccggcgatacgcttgtcctgttcaataatgccttcttcgccatccagcacaaccgccacgacttctgagcggtcaatcgcttttagcgcccgcagtacactatacttctcagtcgtttcatagactttccctttttttcgcatacctgcagtatcgacaatgacaaactcctgctggttgtaagtaaatgacgtatcaacagcatctcttgtcgttccagccacgttgctgacaataacgcgttcttcgccgagcatcgcattcacaagtgaagactttccgacatttggacgtccgatcagacagaattgaataacttcttcattgtatttcgtttcaggaatgtttttaaaatgctctgcaacggcatccagtaaatcacccagtccgagtccgtgtgttcccgaaattggatacggctcgccaaagcctagcgaataaaaatcataaatattcgctctcatttctgtgttatccagtttattaaccgctaaaacaacaggcttttttgtgcggtacaaaattttcgccacttcttcatcagcagctgtcacgccttcacggccgttcaccataaaaataatcacgtccgcttcatccatggcgatttcagcttgctggcgaatctgcgctaaaaacggctcatcaccgatatcaataccgcccgtatcaatcaaattaaaatcataattcagccattcagccgagctgtatatccgatcccttgtcacgccaggggtatcttctactattgaaattctttctcccgcaatccggttaaagattgtggattttcctacatttggtctcccgacaatggctacgacaggtttacccatagtacccttcctttcaatccagccgctttcatttttacataaattttcaaccggttattaaaatcatttcattcacttttatgaaaagaaacccttcagaggaagggcttaactcatttattatatcagtttttactgggatcacaactattcttaaaaatgtttcacgatcaaatacacgtcatctccgattctgtgagctattccatcaaggatcgcctcaagatttttagcgaaaagctccatctccttttggtcattgcaaaaaaagacaggtgctccccctgcaacccgatttcgatttgtcgtgattacagacaaaatcactttcgtaagagattcactcatcctatcaccttatcctgattcttgataaattcagtcggcattctaatcgcattttccagggttggaacattgctaataatttgaacagccgtttcgggatggtgaatttgcgggagaacaaatactgccactctcccatcatttaaatcccgttttgcaattggtgtcaaagatggctctcctgaatcccgataaaccccgagcacattggaaacatcaaataaaatggcctgacgctgccctaaatttgctatcgtcgctgctgaattaaagtttttcggcgtcaaaataaagcccatgccatgctttaaaatcagttcctgtttctctggaagcccgatattcatcatataaatattatcaacaaacagtcccggaccgtcaaagcgcggctttatgtactcgatatctacaatatccttcaacacactgcccgacataaacttcatggccagtaaaaaacaaacgacagccgctatgactgcagcccagatggataaaaacacatacgcagaggttgtcaaaagcgctgtaaagatcacaatataatttctgctttcaaacgcaatggcaatcccctcaatatatgtgcttccccttgagacaagttcatacgaatccatttgcgtcaatgtgttccgctccatgtttcggacatctctaaattgcgtcgctgccaatgttaaaaatgtgatggccgtaaattcctcctgcaaaagcgccggcataataattgcacctaaaccagccgctatcaaccccagtgcgatgtgaatcactttcccatgaacataggtcggatactggcggtaatccgttttcagcatataaagccttgtcgcaattccggcaatgaccccagcaataatcggatagatgtaatcactcatgacattttggtagctcctttgtttgatcttttgcttttctgaccaatctggcttgcgaggtgttcgtatttagatatgccaaacagcaatatcatccccgcagaacacgcattcagccattgaaagccgccgacagccatagccccggccaacttctggatcacaaatgaatacaccagttcgccttggcacatccctaggacaaataagacaagctgcttctcaaaattcctttcaacagaagctgttaaaagcactattaatataacagcagcccactcaggttttatgatgaaccaaaccgggtcatataatgcaaaaagataaacaaacgcatacgcggcaacaagcgtcagatagaccatgatgtaacgaaaacgatacattcccaaatacccggcatagacacatccgcaaacgaaaaacatcaaatatgcagcattcagggaaaaatataaagcgatgtcatgtatgcttagaataatattagttaaaataaagacagagacggcaattcgtcttttcgtcttttcaaaaataaatgttgtcagaacccacagaaaccacattgaccaatagtaataaaattgttccattttacttcctccatattcccagtatggagttcaagcacattttttaaacaatcgatctcacattaaggagtatgatcatgggaaaagacagacaagagaaaaaactcaaagcttcaggcagagtcgaatcagatcgcgaccagtccattcactatgacggagcgacaagccttgaacaaaacggaagattcaaaaagcgaaaatcataatacaaaaagcccaaaccacatatggttttgggcttttatcatttatcgcacactatagcttgatgtattgacccctctctctgtgagccaatgatgggtttcacctttgatcacaaggggcgccttttgtaaatcggcaattgttctggcacccagcacggtcataatcaactttaattcctcaaggatcagctgaatctcctcaagcagtccttcctcaccgctgtcagtcagcgcttttaaaaaatgccctgccattccggtgcaagaggcccccagcgcaattgcctttgccacgtcaagcgcatcttgcagaccgccagaggcgatcatggtgcttgcaggaaactcagagcggatttccgccaaacttgcagctgtcgaaatgccccacgaattaaaaaaggagatttgccgctgtcttcggagattttcgattttcgagaaatttgttcccccgtaaccgccaatgtcaacagctgcagcaccagcttcatacagctttcctgctgatgctttgctcataccgaagccgacttctttcacaatgaccggtacactgacccggctgcaaatttgttcaatgcgtttcaatgcgccgctaaagcttctgtccccttcaggcatcacaatttcctgaatcacattgaggtggatctgcagtgcgtttgctccaatcatctcaacggcttcctttgcctgagcagccgttgcctcgcttcccaggttggcaaaaatcagcccgtttgggttttcctttcgaacaatttcataggaaagacgctctgatggatcttttaatgctgacatttgcgatcccacagcaaggggaattccagcctgagaagccgctcgcgcaagcgatttattaatctcatatgtaagttttccgccgccgccagtcattgcattgataaaaatcggcgaactgcttgaaagttcgccgatttttgtggaaatatctacttgttctaatgcaagatcgggcagactgacgtgaacaaacgtaatatcatcaagacctgtttcccgcttctggccgatggacaaggcatgattgatgtgttgtctttttcgttctgctcgagtcacgtttatcaccaattattttagtttattcagcttatctccgatcagatctccaagctggaagccagtgcttgtttcttccttcgcttgatattgacggtaatcttcctggtcagctttaggcgtttcttcaagttcacgcatgcttaatgaaatgcgctcctcattttcattcacatcaagaaccttcacttttacagtctgtccttcttcaaggacttcatgcggcgtgccgatgtgtttattggaaatttgagaaatatgaacgagaccttcaacacctggaaggatttcaacaaaggcaccgaagcttacaagacgctgtacagttccttcaagcacatcgccaggcttcactttttcgccgatttggttccaaggtccaggcagtgtatctttgatcgataaagaaatacgttcattatcacggtcaaccgataacactttcacttttacttcttgtccctcttcaacaacgtcagacggcttctctacatgagagtgggaaagctgtgaaatgtgtacaagtccgtcgatgccgccaatatcaacaaacgcgccaaagtcagtcaggcgctgtactttgccatcaagtacacttccaacttcaagagactgaagaagttcttgttttttattcgcttgttcactttcaacaacagcacggtgtgaaaggatcacgcggtttttatcacggtcaagctctacaacgagcagtgacagtgtttttcctttatagtcagtgaagtcttcaacgaaatgtgcttcaacaagtgatgccggaataaaaccgcgaacgccgatatcaacgacaaggccgcctttcacgacatctttcacttcagcttcaaacacttcttttgtttcaaattttttctcaaggtcttcccaagcgcggtctgcatcaacagcacgtttagataaaatcaaagcatcgtcttccacttttgttactttcaggtcaagctcgtcgtctactttaacaacatccgatgctttctctacatgaagacttgataattcactgattggaataataccggattgtttgacattgataatttctacatctacatgtttgtcttctacctttgtcacaatccctttaactacatctccaacctctggcacttgaacatcaatttgattcatttcctctgtcatttgaataacctccttggtccaaacctacacagcttaattaaaacggtttgaaagctgaacatataacatgcccgcttttagccgaatatgtattaaagaatcatccaaaaaagttttttgaatgatcaataaaaagttttattagtattaacttctaataaaaggacaggtttgtcaagcaataacattctatcttcgttgaaaaattcaaaaaaagtggcatttgccatcctcagcgggacttttgctccacagcctcgaggattttatcagctacctcttgaatggaaagcgatgtcgtgtcgatttcaagagcgtcttctgctttacgcagcggagatacttcgcgctctgaatcaagcttgtctcttcttgcaatttcctcaattaatgtttcgtagttgacatcaaagccttttttcacattttcttcataacggcgtttcgctctctcttccacagatgccaaaagaaagatttttacttctgcatttggcagcacatgcgtcccgatgtcacgaccatccatgacgacgccgcctttttccccaagctgctgctggcgtttcaccatttcttctctgacacttctgtgcttggccgcaattgaaacttggttgctgatttcatctgttctgatcgcctcagttacatcggtgccgtttacaaacactttttgtccatcttttgttgtaatcagctcaatgtctgtccgctttagcagctcagccagtttttcttcatctgtcagatcaacgttttcctgtaaagccgcgtacgtaatcgcccgatacatcgctcctgtatcaatatatatgtacgattttttctcagccacaattttggcaacggtgcttttccccgcagctgccgggccgtcgattgcaatcgataatttcttttccataattcctctccttgctcttttctcctctaaggattgtatcacgaactttatgaaaaagggtgaaaaattgatgaataattaatgtttgaaggtttcaatcctattgttttcctccattttatccaccccttcatattgaatcacttttgatacgtatggttcaatatgctgatagtgaaaaagaaattggacaccaagtaaaatgatggcctgaatgaacaataatttgatcagcagccgttcaaatgttttcattggagcacctccattacaaatagtatggaagtgtttgccgatgtttattccattcgggcctttcttctcttatttaactggcgcctgatgcagtattgaagcaaagcctgctggtcacctgctgcaatttctgaatactctaaagtcatttttcgtttttctgacttggggtcattaaagattcgtctgacaactgcttctgtttctatttgacgtgtgtgctcctcttcaggaagacggatgatcaggcgcaatgattcccccgattgaaaagaaaggccatcagctaaaaccacggcgatgccgcctgcactgatgttataggatagtgtgcggatctcttcttcatttcccggctgaatttgcacatctaataccgcatcagttcttacatattggcggcgctggattcttttcattttttcacggggaggcatttcaagacagatcatttgaagtttgtccttcactttaccttttatacggcttataaagcgataaggaacttcgtcttttcccacaaactctaccgttacttccatatcgttatgtaaaatcacagttcgccctgtaactacatcaacaggatacgcgatcaaaagttcattgttttcgatgctgaccgccttgctttttgcctttttcaattcattttcttctatatattctaaaagtacattttctccaatctctatcattgacttcactctttcgcattcaatatactcacgtttttattaaagcacgtaatgaaaaaaaggaaaagacatttagtcctttcctcctgtttttataggtctttatatataggttctgcattttttagtttttcaaccttttcttccgatccgtctttggcattgatatacattctgaatgtgtcattttcaattgtcccaagcatttcgtagcataacacttcttgacctagttcatttgtaatcaaagcgagccttgtttctctcacttgtacatttttatttaatttagactttgcctctgcttcagtaattgcaggcttaggtatggttctttttctgtgagatgtgaggaagtctcttgctgaaaagccgacaacctcaccgtcatccaaggccactttcatacgaattgcctcggggtacatccggactttattttcaacaggaacatatgaaaatacaccgattttatcatattgggcactttcatcaatttccaaatcatctgtttcaaatccgtttttctttaaaaatgcaagcgctcggttcgatccgtcatttaaactgattttctgatctttcacttctctgttttggatcaagtataccggatgcccgcccttcttcgtaatatccatataaatcactgctttatggtctgggtctttcatgctgatgctatatacatcgcgatttgttttttttccgctctttaccactttaattgaataattgtcatctggggcaaagcgctcagcaatttgttttgcttcctgttcggaaatttgttttcccttcagatggctgaagcctttctcttcttttttcgtactggtgaaactcgggccaagatcagtgccagtggagaatgcaccaacatttttttcgactgttttaaagctgttgataatcgtattatcactttgtttttcgtcagaagccagagccatttctacgtccatccagcgaaggtttttgctcatgacaaggtgctgaacatgacgcaattcattttgtatatcttcggactgctgatatagcttatttagtgatgtatactcgtttttatcaagcggcttttggtccaaatctctgactgacgttttatagctgaaatcgccgatctttgataatagctcttcagttttattaaacggcattaatgtaagcggcagctgactgacgctgttatgagcttctgatgtaatcctccacacatcgatcaatgcaggcgacagtgatttttggctgttcatggcaagtgttgttccgattttatcatgaagctgatccacctgataggtaagctcatgaaacgcccgctgatagttattttcagcatgaagaagaactgcgtctttttcctggtgttctttgtatccccagtagcctgtaccgactattgcaataccaagcacggcgattaaaattcctctgatcatttatcacacctctttttatgctttctcatatctgctactcacagaaaatgtgtttaccgattcttttaatctgcggacgcccccaaatccacggacttgtagccgtatccggattaaagtagtaaagtgcttcctctgatgggtcccagccattgatggcatccagcactgcttctcgtgccgtttcattcggctgcatgtaaatttgtccgtcggctactgctgtgaaggcaagcggctcaaaaataacccccgctactgaatttggaaataacgggctgttcaaacggtttaaaatgactgctgcaatagcaacctgcccctcgtacggctcgccccgggcttcgccataaaccgcttgagcaagcagcctgatatcgttgttggaaaatccaccaggcatgttcgctgctaccgcatcctgttttcttgcttttgctggtgtattgttttgctgtttattcgcattcgctttaggcttctgcgttgttttttccgcaggctgtttctgccgtgcttctgcttgttgtcttgccttttgtgttgctgcttttgatggtttcgtctgatactttagcggaatttttccgtaatgcgtgaatgtattccctttattgagctgttccatgacatattcacgatagtattttgatttacatattaaggtttgctttgttttagctcctacaaggccgtcaacctcttttaacccgaattgatcctgaaaatttcgaactgcccagtacgtcccccatccataaaccccgtcaatttttccgttataatatccgttgtattgaagacgcgcctgaagctcgaccacatcatcccctgttgcccctctttgaatgacctgattcgaaaaggcagagatcgtttcagtattaataaacgtcgttattgtaaaggaaaaaaggatgagacatgccataatcgatcctttggacttcatcttttcaagcctcctactgcaaatttttaagtgtaatcgtattttctgtaacgaggttatttttatacactctttccttgttatccctcagaacataaaaactgcacacaaaaaagccgcacggttgctgtgcggcttctatacttgcatcatattaacggaacgggcttttttcgctttacgcaaaccaaaccaccataaaaataccataaatggaagcatataataaatccaattgctaagcgctgttaggataaaatcatatgatccatgcaaaagggatgggacaactaaagaaagagtaagccactttacacgcgccttatcagcggaaaaacgggcttttccaaggtaaaatcccattataacgccaatcaaggcatggcatgaaacaggcagcagcgccctgacaaacgcatgctccacgccgtggccaattaaataaagaatattttcgagggttgcaaaaccgagtgatacacttgcaccgtacacaatcccgtcataatgctcatcaaagtgggcgtgcgggtaaacactgatcatcagtataaaccattttaatgattcctccaaaaaccccgaagataaaaaagaaacgaaaaagcttccgcctcctacattctctttttcaagtacatactggataaacatgatgggaaatacaagaacaaccccgagaaaaaacgaccgtagcaccatatgtacaggttcattatcatactgatcttttaaataaaaataacttaataacgcgatgccgggggcaattcctgcagagatgattgcaaacatcaggcaacctctttcctttatattcctacatctatcctaccatgttgtttaaaattttacatctgtctgcacttaaaaaaacaaaaagagcatacgaatgcatcatatgctcctcatctttaatggttttctcttttggcgatttccgctgcgatatgccccccgtgaaacctgccgttttcaataaatatttcatttgcattgtttcccgcagcaataacaccggcaataaagacaccttcaacgttcgtttccatcgtttcttcgttgaaaaatggacgccctgtttctttatcaatttcaacaccaattttttcaagaaattgatgatcgggatgatagcctgtcatggcaaatacaaaatcatttttaatggtaatgagttctttctctccggagcgaaacacaacttcattctcggtgattttttcgacacaagctccaaattccatacggattgtaccgtttctgacgagagcttcaaattccggcagaatccacggcttaatgctcggagaatactcattgcccctatataaaactgtgacacgcgccccagatttcacgagttcaagggcggcgtccacgcttgaatttttcccgccgatgacaacaacatctttatcaaaatacgggtggccttctttaaaataatgaaatactttcggcaaatcctcaccgggtacgcccatatagtttggatgatcataatagcctgtggcgatgatacaatatggcgtcgtgtaggtctcttttgacgtctcaataacgaatgtgttattttgcgttttcgtcactttacgcaccatttcaaacgcattaacacggatgtttttccgtttaacgacttcccggtaatacgataaagcctgaattctgacaggcttcctgttctctgtaataaatgccacatctccgatttcgagcttttcacttgaactgaaaaaggtttgatgcgtcgggtaattgtaaatactgttaacgacattgcctttttcgatgacgagggcatcaatgccaatttgttttaggtgaatggcagcagatagtccacaaggtcctccgcctataataattgctttttcttgaatcatttctgtcaactcctgcgattggcatttcacttcatattttctatttccgaataaaaaaatctcctattttatcataggagattttttatttttatgcaaatcatcaacttatatccagcctctaaaacgcgaagcttcagccattttgcgaacgccgaccatatatgcagcgagcctcatgtcaattcttcggttgttagccatttcgtaaatattgttaaatgatttgaccatcattttttctaatttttcttctacctcttcttcactccagtagaagccttggttattctgaacccattcaaaataagaaactgttacgccaccggcacttgccagcacgtctggtacaagcagaatgtcccggtctgaaagaatttttgttccttcaagcgttgttggtccgttcgctgcttcaacgacaattttagcccggatattatgggcattttcttctgtaatttgattttcaatcgcagcaggaacgagaatatcacaatccagctccagcagctcttggttggtaatggtatcgttgaaaagctttgttacggtaccgaagctgtcgcgtcggtcgagtaaataatcgatatcaaggccttccggatcataaagtccgccatacgcatctgagatgccgacaacttttgcccccgcatcatgcataaattttgccaaatagcttcccgcgtttccgaagccttggacaacgacacgcgcacctttaatatcgatgcctctcttcttagccgcttctttaatacagatggtaacaccttttgctgtcgcagattctctcccgtgagatccgccaagcacaagcggtttgcctgtaataaatccaggcgaattaaattcatcaattcttgaatactcatccatcatccaagccatgatttgtgagtttgtaaatacatccggtgccggcacgtcttttgtcgggccgacaatttggctgatcgctctgacataccctctgctcagacgctccagctctctaaacgacatatcccttggatcacaaacaattccgcctttaccaccgccatatggaagatcaattatgccgcattttaaactcatccaaattgaaagcgccttcacctctttttctgttacgttcgggtgaaaacgtatcccgcctttcgttggaccgacagagtcattgtgctgcgcacgatatcctgtgaaaatctttactgaaccgtcgtccatacgaacaggtatttttaccgttaataatctcatcggctcttttaacaattcgtatacctcttcgggatatcccaatttttccagagccttatgtattacggtttgggttgattttaatacatcaagtttgtcctcttctgtatgaccggtgtttcgatcggctgccatttgagttaacctcctagaatcttctgtttctcacatgctccctttcagagaatagtatacaccttcatatgatctgtgcatagaataaacgttatgtttttccatgttttttaacgaaaaaaaactgctgaaatcagcagttttccgttgcattcttatgaaaaatgagtttgtatcgtttctacggcattaccgtccataatgagcttaccatactcttgcaggcgataaatcgttaaagttgtcggattgccgtattcagccagaaccgccacaaccccttcagccgtatgtgaccctagatcttcaaggcttaaaaagtactgcccgtcatagtggtagacagttccccctgtgataccgattcgctgtaagctttctgaaagctgaatgatatcttcaaaggaatggaattgatatatgatgtccgcgctttcatcaagcttgacttgcatttcgatgtaatcatcatcatactcatcgtcttctgaatcggcgtcttggttctttgttacaatcacgaccatcccttgtgcttggagagaatacacttccactgcaatcggtccattcgcttcaaagccgagctctgtatttgcttcattcatcatatctttaaataactggtggactttaaatgagtccttccagaggtcttcttttgtcaatccccggtctgtcaaatcatcgagggttaaaaagattttgatcttattataattcagacgctcaagccgcataacgttccctcctgcctctacttgcacacaaatcatataacacattatatgagatgatgagtcataggttcttaattgttatcagtttacactgagttcactagtaagacaagcacaatgcagtttttattgccatacggatttttgctttttagaagttattctggcccgcaaagagtcacaatgtgagtttcaggctcagcacctaaacgaagaggcacttttgtcgtgccgtagccgttgctgatcagatatgccgcgtttttaacaatacctgttttccccagttcataaggaccgaattttccaaacctgatctggcctccatgggtatgtccgctgagtatcacatcaataccgtcatcttcattgatttgttcatgaatctccggattatggcaaaccagaatattcagctggctttcatcaagttctttgatggcttcctcataatgatccatctccatcctgatatcatcaacccccgcaatcgcaatcgtatgcccattgtatgaaaacgggactgactcatttctcagagtgatgacgccgtgcgctttaaatatggaatacagcttatgctgcctgacttcataatcattattcccccacacaaacacgatagggaccccgaaatgtacgagccttttgatgttttcctcgattctcgcactgggcaccccgccctcagctaaatcaccgccgattataaccaagtggggggcatggcttcgcgctttttctaaaaggtcttgatcgatgagacgtttgtgaatgtctgaaataaaaaagattgtcagaggcggcttgcccttcatctttgataaaggaaacgtatgtgtcttcaaatgattgccttttgctgttgcatacatttttgccgtcattgccgctgccgcaacagttagtacaccggcaattttcactgatagcttcataaaaaactctccattctttttagaacttatcaataagacggacaataaaaaaagacgtttctatcgtttgagaaaacgccccattttatttactttcaaaatatagattaatgtcatatttgtgcttcatcatatgaaaaacagactctctcgccttccatttatcgggctgcggccagagatcagtgcttttctgaataatttcacatctcagtttatggaaatcagtctcggatttttcttcctttttcttgaaataatatgaagtgcagtaggcaaaagcggttgccagcatccaaaataaataaaaggtatggctaagtatttcttgaagtataagctgaggctccgggcttttgatcatgatcataacacataataagcctaggcagataagtgaagcccatcgccatctgcggcattgtgctgcataattttcgaatttttgttttcgttttaccagcgcttggagcatctgtttggtcggcgcgtctgtaaactgatccagctgattccataaggattccatacgcttcacaccttgtccattttcattgctacaatatatgaacgtaaaataaaaataataccctattcatccattaaagggatgtccaaaacttgtccggtgtaaacatcatttccattcagatgattatatgctcgaattttttcttctcctgtccggcttttataatacttcatggaaatgcggtatagcgtttctttcttttggacggtgtgcttgacaacgcgattcggcacattttgaactggctcagctggctgttcttgctgttgtactgttgattgggaagaggaagcagccgcggcggttgcttcctccttatttggcgagtcttctttttccgctacagcagtctgtttcttatcagcagctgtttgctcttttggcttggaatcttctggctctttttttgactccttctgcagtgcggtttctttagtgtctgcggtatcgtttttatcctctgatttcgggacaacctcatatttgctttggctgctgtcaataaaaacatcttcataatcgtcatgattatccgggtggctctttagataaaataaggtgactaaaacgataaccggcacaaatacaaatattactgcgagtactgtgaataatggcgtttttgttttgccttgcttttttttctgttctctttgattttttacagattgtcttgtcggaaggctttctccatcatcgacataatcgtccgccaatgcggcgttttgatcttcataaagattctgggcttttcttctctctactctcgacatgttcgtcatgtttatccctcctcacatgttcaaaacgaatctgacaggcaaacacggcatcaatgataaaatgcgccgtcatcggaacaaataagttgccggtccattcatacatcagaccgagcaaaaagctgattgctgtcaccataataaataacagccattttgacaaataccgaaagtgcagagcggcaaatataaggctggccgtccataaaccgatatgagtctgcagcactcctctgaataacatttcttccgcgaaagcaatcagaagcgttaaaaatataatatgagggattgacctcttactgaatatttttttattgattccgccgtcatcatataaatgagacggaaaccatttcattactgccatatcggctaaaataacaataacagctatagaaacaccataccagatgattcgcatatcgcgaatgtcccagagctttaatacgtcccgtacatcctcaaaaaagaacagtcctgctgcagcagcggcaaagatgatgagtagctgcgtcaaatataactgcttcagcatatcatggtcagtcatatgctgaatataatctttttgctgtttcagttcagctcacctacagtctgcaagctgaatatccggtgcaattccgaactccagctgtctaatggcgccattttactccgttcccctttttgttcatacaaggataaatcaaaaccgcaatgtgaacagcacgggaggtttccgtcatcaggctcgtatgattcatcaaagtaggttaacagtgcctgccttaaacagccgtcacgctgaagcaaaaatgatacacggtgcattttttccagcttcagctccatgcgatatgaaatttctttcttcatcagttcaactgatgtttttccctgcataaagagatgaatcatcatacgggcctgtgtctctccgacgccatactgaagtaatacgtcacgcagccttctctcatcccgctcctccgtcttctctagcacacggattacgtcggcgatttcttcagctgtgacactctccatctggataatttgttcctgcaattcaaaatcccctggcgcccgcagcaaaatgctgacactcggctttccgtcgcgtcccgctctgccgatttcctgcataaaagcttctgccgtctgcgggagatgaaaatgaatcacatatctgatatcaggtttatcgacacccattccaaacgcattcgtacaacatatcacatcaagctggttatgaataaactgctgctgaattaaaatcctgtcccctgactccaaaccgccatggtaaaagtcggctctgctgctcgttttgcttttaatttcacccgctaattccttagcccatttccgtgttggacaataaacaattcccggaccttgcaggttttcaaccagctgaatgaccctatctattttttcggcagtatccgccgcattttcaaccctcagtgcgatgtttgggcggttgactgagttgagatggcgtacagcatgctgcagctccagcaggttcatgacatcttgcagcgtttcctttgtagccgtggcggtcaatgccagaacgggtgggtgtccaagtttttttctcagctgtccgagctttgaataatcaggcctgaagtcgtgtccccattcagaaatacaatgcgcttcgtcaataacaaataggctaatcggaacgcttttcaatttttccaatacatatggagactgtaaagcttcaggagacaagtacaaaaatttatatcgatgaatatgttctaaaacaaattgtctttcctgcctgttaagcatgctgttcaaagctgcagcacgcttttccccccgggctttgagctgctgcacctgatcctccattaaagaaagcagtggagaaacgattaataccatgccatcaagcatataaccaggcagctggtagcaaagcgatttccctcccccagtcgggagcattgcaatggtatccttcccgctgagtatgctttcaataatgtcctgctgcccttttttaaaggaagtaaaaccaaaaaactgatataacgtttgctgtaatttagtcatattgctgcacctgctttgtcaatgccagtctgatttgaaagtagctgaaccgctgttccagcccgtcgcgaatttgtttgattttattcgtccgcatccgtttggcaaactctgcgatttgaagctggtcttctgctgatacatagtcattaatcataaacgcaggctcatggagagaaatctcgacaatgtggtcttcaatcgtcgctgttttcagctttctgatttcagcaattcgctgtatcggaaacccttgtttgaccatctgccatgttttcctcgtcgactctgtcagggcattatctaagtgcacatcagaaaggagatcctttaacaaagcatcttcacactccggaagagaatgaataaaataatgtaccgaagcccaaaacatgatatagacataccattcgtcttctttcagcgtatcagcaagctgcctgctcgtataaccgatccgatggtgcgaggttaaggagtagacaaaaatttgcgctgctttgttttcaatctttttcaaatgcgcctcaagcatggcaaaaaggctttttgccatctctatatgatccgtatgccgggacaggtatttctttacccagtgaagtgtcttatgatcctttgtgacagggatatactgcctgctcccttgctgtttatgggataggacctgcacaagcagcgaaagccttttccaaagcacgccggcagcctgctgataatgagcgccgtgacaatgaacgggccaaggccgctcgctaagggcatgtctcaaaactgctgcgccgctggctgtcactttgtatgtatctgattcagacattggcgcgagatatgaatgcttttcaagcttgtcaagcgacgcagaaatatcgcttctcgaacattttgccgccattccaaagtattttgcagtctgaaataagccggcatcttgaatggtctgtgacgatctcttgcctttgaataggtgaaaaacagcgcttcccgaccgttccccgtttattttgcaaagacaatcgagaaccataatatcgaagtaatttaatgacaacctatccacctacattcttcctgacaaaaatcgttgatttgctctttttattttaacagatttcaaacagaaatcgacgtttaaagtcatcattaagggggatgttatgtagataaccccttatgtgataagcattctcaatcatttttctgttgaaatgtggcagcaacatcattacaataagtaagaggaataggtgttaaattgattaaatataaagattgatccatttgttccaccaagaacaatctgggaggttttattcatggcaaagtacacaatcgtagacaaagatacatgtattgcatgcggcgcttgcggagctgctgcaccagacatttacgattacgatgatgaaggcatcgcgttcgtaacgcttgatgaaaacaaaggtgttgtcgaagttcctgaggtactggaagaagatatgattgacgcatttgaaggatgccctactgattccatcaaagtggcggatgagccatttgaaggcgacccgcttaaatttgaatagaagtaactaaaaaaagctcccgaacgggagcttttttatttaatggatatgtgcacttcgctgctgctcaatccatggcttaagcttgataaaaattagtgagaatacaaccgtaattacaataccttttatcatgttaaacggcaggatacctgcgacgactgctgtttttagcgcgctgtcggataatgccggtgaatgtaaaaaccacgtgtatgccggaagaatcagaacataatttaaaatactcattaaaatggtcatcgctgcagttcccaaaagcaggctgacagccaagccctttgctgagttgagttttttaaataagaaagcagtcggtaatataaagagtgttcctgcaataaaattcgcaacttgccctacaggaactccggccatgcttccctgaatgatatactgaagaacattttttatcgcttctacggcaatacccgccaaaggtccgtaaatcagaatggcaataattgcgggaacgtcgctaaaatcgatttttaaataatccggaagacccggaaacgggaaatttaacagcatcaaaacaaatgcaatgctgctcagcatgctgaccacaactaatttttttactttcacttcattctctccttttcgatcacatcttactcgaaaacggaaaggttcttttccagccaataaaaaaaccgcttcatatataaaagcggggtttcgaaaattaggctaggcaaagaaacgtttgaaaaattcaatttcaaaacgcttatgaacctccatcttctcccatccagactgtactgtcggctccggaatctcaccgaatcctgctgtaaagacagctcgcgggcttagagccattggctcatcaccgccggtagggaatttcaccctgccccgaagattgatcatatgaaatttaattacattataaacgataactggttggctgtatagagaattgcttcaaattaaatatattacctgcaagctgtcagatcattgatttattaggctttacttttatcctttactgcgtcaatacacgttgacactcttttgagaatatgttaaattatcagatatttagtttgtcaatttaggaggaaatctaacgatgtttcgagtattggtctcagacaaaatgagcaacgacggtttacagccacttattgaatcagactttattgaaatcgttcaaaaaaacgtagcagatgcagaagatgaattacatacttttgatgctcttttggtgcgaagcgcgacaaaagtaacagaagaccttttcaacaaaatgacttctttaaaaattgtcggaagagccggtgtcggtgtcgataatatcgatattgatgaggctacgaaacacggggtaatcgtgatcaatgctccgaacggcaacaccatttcgacagctgagcatacatttgcaatgatctcttctttaatgagacacattccgcaggctaatatctcagtgaaatccagagagtggaaccgcacagcttatgtcggttcagagctttatggaaaaacgcttggtattgtaggattaggccgaatcggaagtgaaattgcacagcgtgcgagagcgttcggtatgactgtgcacgtttttgatcctttcttaacggaagaaagagcgaaaaaaatcggcgtaaacagccgtacatttgaagaagtgcttgaaagtgcggatatcattaccgttcacacgcctttaacaaaagaaacaaaaggcttattgaataaagaaacgattgcaaaaacgaaaaaaggcgttcgcttaattaactgtgcgcgaggcggaattatcgatgaagcagcacttctcgaagctttggaaaacgggcatgttgcgggagcagcgcttgacgttttcgaagtcgaaccgccagttgacaacaaacttgttgatcatccattagtcattgccactcctcacttgggagcatcaacgaaagaagcacagctcaatgtcgccgcccaagtgtcagaagaagttctgcagttcgcaaaaggcctgcctgtcatgtcagctatcaacctgcctgccatgacaaaagatgaatttgctaaaattaagccttaccatcaaattgcaggaaaaattggcagccttgtatcacagtgcatgaaagaaccagtacaggatgttgccattcaatatgaaggcacaattgctaaacttgaaacatcgttcattacaaaagcccttctgtcaggctttttaaaaccgcgcgtagactctactgttaatgaggtcaatgccgggggtgtcgcaaaagaacgcggcattagcttcagtgaaaaaatttcctcttctgaatctggatacgataactgcatcagcgtaaaagtgacaggagaccgcagcacctttactgtaacggctacgtatattcctcatttcggagaacgaattgtcgagatcaatggatttaatattgatttttatccgactggtcacttggtgtatatccagcatcaagatacaacaggtgtcatcggccgagtaggacgtattctcggagataatgatattaacattgcaactatgcaggttggccgtaaggaaaaaggcggagaagccatcatgatgctttcctttgacagacatctggaagataaaattgtgaaagaactaacaaatgtccctgatattgtgtctgtgaagctcattgatctgccataattaaaaaaactcaagctatatagcttgagtttttttattgttctatccccgtgtgtttttatgcaaaatatctaagacactccttagctcagaaacaggaatttggcctggtgcggacgcctcttctccagctccaaaagtacaagccgatccaaaaacctcaccgctcagcctgctgatgagccctgttgcagccattgacattgtaataatggggcggtctgcatatattgttttcattgtatacgtcgcatcaagcagtgttaggagatctccagtatcattcggcatgacagccatttttggaatatgcgcgcctaagtcctgcatttttcgaagtctggaaataatttcatcttttacaggtgttttttcaaagtcgtgatttgacatcaccacatagacgttgttttcttccgccagcgatactaacgcttttacatttgcatctcctgaaaataattcgatgtctatcagatcgatgtcttttgtttggattgccgattccagcaaagcaagataggagctttcgtccatctccatgctcccgccctctttgtgggttctgaatgtaaatagaaatagcttgtcttctaaagatttacgaagcttagaaatgagctttgtgaccgcttctctgtcattcgctttttcaaatacgtcgactctccattcaacaatgtccggattcagtaattttactgcctctgcttcattcagaatttgtttttccgtctttcccatcagcggaatgatgattttcggcatcccttccccgatggaaactcctttaatcgttaacacgttcactcgtctcaaatcctttcaatctttaccttgttttattatacacgtacaacttttttttgaaaatttctattatatgaatagcaactaaaaaagagccttaaagggctctttttagtttaaggaaatcggatttggagcagctggcaccggaattgcatctgatatgtcatatttgccgatttttttcgttctggtttccgtaaaggtcacttctgtgaagccaaactcttttgcagtcaaaagtagtccctcaatcattaaaataccggcaatagaatcatcaacttctgactcctttgaaaagcggatatataagtgtttctgtttcttcgttacagattggacagcacccgcttgaataagaggtgtcgtatcttcttggctgctcgattccatttccttaatcgcttcttttactgtatcaaaagaatgatttgacggaacgagaaagtcttgtccttgtttattttggtacaagtagtaggatcgttttgactgtttgggaatcgaaatttccgtaaaagtgccatatgagccaatccgaaccccagtctcattttgatccgataaaaatttgactttttcataaggactccattttaaggattctttaagcaatttttttaacagtgtatcatcttttatagaaaatgccgtagctggctgatggactcgtatacttaattccttctgctttggtttttcctttatttctacttcatctatgaaggttggaattgtaatggcatgatcaaggatgcccaattcactactttcaaacagcatatcctggatcgtttggtctgcatttgttttttgaatgctgacgggtatgattgcagatgtatcggcatcagcaaccgctacagtgatgtaattgtcttgttccttttcaggaacgacaaacgatgtctgatccaaggacgatgcagcttttgggctgtcttctgtctcagttttcgttactgcgttctcttgggacgcttctttttgttgaggctgtgcctgatcaaagaaatgaggagaaataatgaaggcgatataaaccgcaattgcagcggcacacgcggggccaatccacctgacagcgggcttatttttacgctttgccatcgtcagccgcttgtaaatatcctgaggcgaacgatggtctttaactgccggaagttgacttaacaactcctttatctgttcttcgttccattctgacttcatcatccattagctcctccctcaaaagctccatatgtttccgaagtactttgagccctctgtgttgggtcgtttttactttgctttccgagaagcgcagagccttggctgtttcctgtattgaatatccctgaataaaccgcaagataatcacagctctttgatcgattgtacattgatcaagcgcagcataaatttcccggacattttcatgttgaaccgcaagttcgtccggcagcaattgctgatccctgacatcctgtgtatcccagtcaaatgtaccgagtatacgctgtctgattgtttgctgtttacggaaccagtctatcgcaacatggcgtgcgatagacaaaagccatgttttttcactgcttcttccttcaaacgtatgataagaatttaatacccggatataaacctcttgaagaaggtcttctgtctggtttttatcctttaccatataaaataaaaattggtacaaatcttgatgatatgtatcatataataattgaaaggtttcttccatttgaaacccctccgttcacttttttgtcgtatgaatagcttgaaaagttacattacaactatattacgagtaactggaatttggaagggaatttatattaacatatccttaaattttattaatgttggctattaaaaaaacacccgctcagtcagcgggtgtttcttatggaacaagattcttcggcaaattcagactcgattttaccgttttgtcggaatataaaaagaaaatgttgttcctttatctattcggctgtgcacagtaattgatccgttgtgggcttccacgatatttttaacgatagccagccctaacccggttcctgctctgccccttgtccgcgctttatctgccttataaaaccgctcaaagataaatggcagatcttcttccggtatgccagacccggagtctttgatatcaattttcaatccatccttcacagaatggactgaaatggagacactgccgccggctgaagtatgccgcagcgcgttatcaatcaaattggtaaatacctgctccatcttgtcttcatcaaacataaattcctcttctgtgagagaaatgtcatgatctaaagcaatatttttttctttcgcaacaccggaaaacttccgaatgatcttttctaaaaactcattcacattgattttttcataatgtaagcctgtatggcctgattccattcgggctaaatcaagcaaatcattaactaaacggcccattcggagcgattcgtcataaatgatttgggcaatttctttccggtcttcttcagagcttgcaatgtcatcgacaattgcttcactgtatccctgaagcatggagatcggtgttctcagctcatgactgacatttgcgataaagtcctcccgcagcttatcaaggcggcgttcttctgtcatgtcacgcagtacggcaaccgctcctctgacgtgcgattccgcataaagcggcgacatcaaaagcacccatgatctgccttgaagcgtcatctcaatcatttgttctttttcagtgctgacagcgttttgaaacagctcttttgcttcaggcggaagattgtcgccttctttgatattcatgttctgttcataataccaagcctgaagaaaacgttcagccggcgggttggtcacaagaatcgtaccgtcaatattaatggtaataaccccgtcagccatactgctcaaaatgttagaaagctgctctttttcttgattgagcgcattgatatgaaagttaagctgccggcccatttgattaaaagcggtcgccagttcaccgatttcatcctgagttaaaatcgggatttttgtatcgaacttgcccttcgccaaatcctgcgcgccttctctcatttttcggagagggtacgtgaccctgcttgataaaaagaatgcgaaaaatgtggtcagcacaatcgcaattccagcggcaagaaaaatatagcgggtcgtatgttttgttgtatctttaacggcaagcaaagactgggataaaaagaccatgcctttctttccgtctttttcatacgggacacctacaatcaggcgttcattatccgtgtctgtatcgctcagtcccgtccgtttgcttacttttttatggtctttgagagctttatttaagtctttgtcatgctgtatttgctcaaccgtaatagacgacaggcgatttttatcattcggagaataccagtggttcttctcatcctggatgatggcaatgcttgttaagttatcagcgagttcccaagtgattgaccttgccagtgcctggtcctcgtgattttctaggatgacagcaactttattcgcaagctgtgttaaatcattctcagcttcttccacatggtagttttcaataaactccagcaaaagaaccgttaaaatgaacaatacgatcaagacgagtgaaaggatcgtaaaccacagcttgcctactacgcttttccaaaatttcattcagcgccgacctcaaatttataacctacaccccatacggtgacaatttttttcgcagcttccggagataccttgttcagcttctctctcaagcgtttgacgtgagtgtccactgtccgtaaatcaccaaaaaactcatattgccacacttctttcagaagcttttcccgatcatacaccttgtcaggcgttttcgctaagaaatatagaagctcatactcttttggcgtcaggctcacttctgttccatcagctgttacgcggtgagcatcatggtctattgacagatgtgaaaacacgagcacatttttcgtcggtgtattggcattgaaataagaggtttgggatgctcttctcaaaagggcctttacacgcagcacgacttctctcgggctgaacggcttaacaatataatcatctgttcccgcttcaaacccctgcacccggtttgcttcttctccttttgcggtcagcataataatgggtgtcgcttttttttcacgaatttgccggcacacttcaattccatcagtccccggcatcatcagatcaagcaaaattaagtcataattggcttcaagccctttggcaatggcttcatcaccattttcagcttcatctatagcataattttcacgttcaagatacattcttaaaaggcggcgaattctggcttcgtcatcaactactaatatttttgtttcgttcgtttggtccatgttttccccctgctttccttctgttactttcattttatcaaatcgtgagaaagtttgagaactgtgtcgctttcaaaggactatgcataagaatgaagtccggcaagcacaagatttacgaatattaaattaaacataataatagcaaaaccgattacggccagccatgctgacttctcaccgtgccagcctcttgacagtcttaaatgcaagtaagcggcatagaacaaaaatgtgatcagcgcccatacttccttagggtcccagccccaaaatctggtccacgcgagctgagcccaaatcattgcaaagatcagcgcgccgagtgtaaagatcggaaatccgattgatacggccctgtacccaacctcatccaccagatcaagattgacgtttttcaccagcggatgtaatagagcgctgattctttttctgatgatcagacggagagccccatacaacacaagacctgctccaaatgaccaaatgacagtgttcacttttctgcctgagaaaagcgcgggaagatcaacaagcggttccattcttccttcggtcaaaagctctccctgatgcggaccgacaagcgcgggcatttcgtacaccatcacgcttttttctttacttttgtccacccagttaaactccgcttcatagcctgcaagacgaaatgccgatgtgattgcaataaaggcgacggttgtgaccaggataaacataatcgcttcaagccagaaggtctttttgcttggctttgtctggtctacatgcttcaaaagaaagatgacaccagcgacaaagctgatggcaagtatagcttgcccaagcgcggccgttgttacgtgaatatacagccagttactttggagcgaaggaattaaaggcgagatatctgtcggaaacatgctggcgtaggcaatcagcaataaagcaattgacagcgtaaacaggcctaatgaaggcaatctatagagaaaataaagaatgataaacgccaaaacaagcatcatgccaaaagcggtggtgaattcaaacatattgctgacaggcgcatggccgcttgcagcccaccttgtgatgaaatatcctaggtggcagaaaaaaccgacaatagaaagggtgattccaatgttggcccatcggtttggcctgccctttttatctttattcccgcgtatggccccgccgaagattgggacagcgattaaatacacaagaaaggccgcataaagaaaatttccgctcagctctgccatgacatcactcccttttcgcctatttctgtgttttgattaattctttttggtccaccggttcagtcagtccggaatcagccaatataaatgctaaatccttcttcaggccaaaccagtttttattggtatgccctgctaccataactgcaccgtcctgtgagtgcagccaaattcttcgatgctgccagtacataccttgaatgacaccgatcataaaaatggctccgccgacagcaagcacccagagtgtcagatcctttctgactgtaagtccagtaatgtttttcgtttcgacatggtcaaatttcagcttgtatttattattgcctgatccttcgatggtttcttggatggcgacaaagctcttttcgcctttcggtttgtccggcgttatgatattaaagacaaaagccggattgttagggatctttgtttttgtgctcggctctccgtcctgattaaaatagaagtcaggcaggtagctggcgatttccaccttgtaaccgttaccaagatcatagactgaatctggatccagaaggttgatcttcaggctcccaaaggatttttttgtttttttatcaatcagctggaacaccatttggtcaagctgattctctttgtaatccacctggtaaacggaaaaagaatcaaaacgcagcggctgattgacacggatgtcttcttctgttactttttccagcttcggcttctcgccataaacaatttttccttctctcttgtagagtacggcatcagtttgaaagttctttgccactctaccgtccccgactctgtcaatggcatctgcaaatacctttttttccgttttgctgttataggtctctacgctgaattgattgtttttcaaataatattttccgtctgtacccggaattgctgcggtttcgccttctctgacccaaagcgtctcatcgacgtacatgccaggcacaaatctcagcatcgcaccaatcagaaagatgatcaatccaatgtggttgacatacgggccccagcgggaaaagcgtcctttttcagcaagaatgctgccctctttttctctgattctataatgttttttctttaatagagtaactatcttttctttcgattccccgttcagtacagtaactgtttcactgaacaagcgctgccttcttaaaaaggccgggctccttctgacaccttggttttttaacgctctatacaacggaatgacccgatcaaggctgcaaatcacgagtgaaatgccgatcgaggcaatgagcagcaaataccaccaagaaccatataaatgatgaaacccgagcaaataataaagctggccaaacgtgccgtactgctccttgtaataagtatcagcctgtgcgcccggaggcagataggcttcctggggaaaaatggtgccgaacgctgatgcggcaagggttatgacgataagccatattcccaccttaaccgaggaaaagaaattccaaattttgtcgatgatcgttttgttataggtttgcgaacgtcttgcgcttccgtcatatctcatatcagcgagcggaggttgagtttcctgaagagctcttccgcacgattcgcataaaacggttccgaccgggtttatatgtccgcattcacatttgacttgcttcatcccgaagtctctccgggttttatgagattcatataatcgtgtatcatgctttctgtcatagtgccggtcaccaccttgacaacttttccttccggattgatcaaaaaggttgtcggaagcggagatacgtcataggcatcaagcacttggcgatctgtatccagaacaaccgggaaattgactccgtaggatttcataaaattatgtactgctatctttgactccccaacatttacagcgacaatttcaacaccttggcttttaaaatgcttatattggtttgccatataaggaaactcttttttgcacggttcacaccatgtaccccagaaattcaaaaaaacacctttcccttttaagtcactgagctcgatacgtttcccattcgtatcctctaggacaaaattcggtgcgtcggacccttcggatatactctctttgccggcaaatacagcgttgtaaatggtatagccgagtgcgcagattaaaacgagaaggatgccggtccgaatgaataaacgcctttttttcttcattgtccactgcccccttccccctattgcagatccattcaattatatcattgcacgttcatttcacatttcttactttttgaaggttatgtgaaatttagaaagcgtttttaccgtgatccgccagtgctctgagcctttttacttcgtgaggcgtaagctctctggcatcgcccgtgtgcaggcctcgcaggtttaaaaacgcgtattcctcacgcttcagcttgattacctcatgtccgatcgcttcaaacatgcggcgcacctgtctgttgcgtccctcatggatcgtcagctgaataatgcttgtctgctttttcttatccaaagacagcagcttcgctttagcaggcgctgttttgccttcctccagcctaattccgcgctccagctttctgagcagctctttaggcgggattcctttcaccttcgccacgtatgttttgtctatttcatacttaggatgcattagcttattggcgaattcgccgtcattggttaaaagcaaaagaccgctcgtatcatagtccagacgcccaatcggataaatgcgctgcggaatatttttaaaaaagtccgtcaccactttgcgtcctttatcatcttgcgctgcggaaataacgcctcttggtttatataagagaaagtaaaccggctcttcgcgttcaacctttaacccgtttacctcaatctgatcagaaccggtgaccttaacacctagctctgttactactttgccattcacctttacttttccttctttaatcagctcttctgcctttctgcgcgacgcaactccggcatgagcaatcactttttgcagtctttccatgtctttcacctcaagtattatcttacttttttcaaccttaacaaacaagctttttcaaattcctatgccaaatctaaaaaaaacgccgttttcaggcgctcccaaataataacgtaacgatgatgatagatgcaactacgccgattaaatctgcaagaagtcccacctttaatgcatcacccatttttttaatgccgactgctccgaaatacacagtcagtacgtaaagcgttgtatctgtagatccctgcatgacggaagccagcctgccgataaaggaatcgggcccgtatactgcaattaaatcggtcgtcattccaagtgcggccgtaccggagatcgggcggatcagagcaagcggcactacttcagcagggatgccgatagcggagaaagccggttttaaaagatccattataaaatcaagcgcgcctgatgatctgaaaacagttatagcgacaagcattccgactaaataggggataatggaaaaggcaatttctatcccctctttcccgccttcgacaaacgattcatatgtcggaacctttttgatcgttccataaagaagaattccggcaataatgattggaatcatggctaaagacagccagttgatgatttccatccgctcaccttcccttctttttgcggcggtaataaaaataccgatcaatgataatggcaccgattccggaaataagcgttgccaaaatgcttggcccgacgatatctgtcggcgttttggaggaataagccattcggacagcgatcaccgttgtcgggatgagtgtgatgcaggacgtattaacagctaaaaaagtaatcatcgaccggcttgcttccgatcggtttccgttcagctttttcatttgttccattgctttaatgccaagcggagttgctgcatttccgaggccgaagaaattcgccataagattagataaaatatagcccatcgccgggtgatccggcggtatatcagggaacagtttagatataaaaggtctgcacatccggctgaaaatatccaaaagccctgactgctcggcgattttcattaagccaagccagaaaacaagcacgctcatcaatccaaatgagatcgtaatcgcttctttcgcacccttaaacacggcttcatttacatcttgcagagttccgttgcacatcgcaaaaacgagtccgatcacggttaaactgacccaaattatattgaccattttgctccgcctgccgcattcagaaagattgatttaaacgtttcaaaaaattgtttcttcggtttttgatgccgctcattttcataatagatcggcacttttgcgatggttgcatcgttgaacatgatctccatgtgccctacgatgtcagggattttcgaggcatctttttcccatgcttttttcggcttgagcagtgtggtattaatttttacattttctttttcctcttcggtcagcaaataggtgatatcacgtttgataaaagccttcgattcataaaatgtgcctttcagctttggaatatcccctttttttgcaattaaataggtttgataatgctcaaacacatagttaaacatcttcatatggtcatcccaatcattagggtcattaatggtgacggctatcaggtcaatgccgtcctttgaagccgtagagaccagtgtccgttttgcaagttttgtatagcctgtttttcctcctgtgctgtacggataaagcatggtcagcagtttgtttttgtttttccatacgctttccatcgtttccgctttgtatatttttgtgcctgaaatcttttgatagtctttcagcttcatagcatacttagttaaaatggccatgtcataggctgttgaataatgattttcatggtcgtccaatccgtgcgggttttgaaaacgggtgtttttcataccaagctgctcggctttttgattcatcatataaacaaacccatcgaggctcccaccgacatgctcagcaatcgcgacagcggcatcgtttcctgatcttagcatcaggccatacacaagatctttcagcttcactttttgaccttctgttaaataaatggcggagccttctgttctgacagcatttgccgaaaccgtcactgtttgatccattttgccggattcgatggcgaggacggcggtcataatttttgtgatgctcgcgatccgccttttttgatgctcatccttggcatataacactctgcctgacgcaccgtcaataatgatcgcgctttttgcactgacatctatagcagcatgtgctgtattcacatttacggttgcaataagaaaagaaatcatgatcacgaatactgcttttttgaaaatgcgcatgtttgctcacgtccttgtggtggtttgtacaagtttatgcgcatgtccatcagttatgaataacaattatatttctggaagcaaacataaaaaaactctccctgaaaaagggagagtaaacgttatctgattggcgccatgcttgatccggacgcttcgtaatgagccagctcttccctcatcttcagaaaggccgcgctcaacggcaataataattgctcaagcgacgcaggaacagcatgataaaactcaattgcgctgaccccggtataagacgcccggctattttcacaccacgtgtcttttttcggcataaagaactcttcaatgcattggtgatacacattataaagtgttttttccgctctggcttcctgaaaaggctcctgcatcaggagacgacggcacgcttctgcgcctccttcacaaaatactgccattcttctcagagtgctaagcacatcacagcagtatcctttttcaataggcaattcagcctgtaaggactcaagcgtcgtttgatttaggtaatcgttcacggtattgacaaccattgataagaattcgcctgttttttgagtctgcgctcgcacaatcgaatgtcccatttcgtttggtatcttcccctcatgtatttgtctctcacattttgcttctttcatgatagcttcttccttatatcttatgatgatgaaaaagcgcgattcattaaacttctattttatatcttcgaaggtttggttaaagttttcaaaaaataaatctgcttcttcttgaagaacgtcttcttccgcattttcaggcagcggcggaagctcgtccagcgttttcagaccgaattgttcaagaaaagtcggcgtagtaccgtataaaatggcccgccccggaccatcggcacgccctacttcacacaatagcgccttcgcgacaagactgtgtaaaatccgctctgattttactcctctgatttcttcaatttctgctctcgtaattggctgtttgtatgaaacaatggccagtacttctaaagatgcttgagaaaggccctttgacggcacttcaatcagttttttcaagtaaggcgcaaagtcttttttggtagagagcatgtacgtatctgcatactcaataagttcaatccctcgtgtatctccgcggtattcgtccgccacatccgccatgatcgtgttcagttcaggctcttcgatttcaagcactgttaacagctgcttttttgtaagcccttcatcgcctgccgcataaagaagggcttccacaatagctttccaattcacgatatcaagccccatgaatggattcactccccgtaatgtaaatatctgaaaaattgtgctcctgttcaatgaggaccagctgatttttcatcagctcaagaacagctagaaaggtcactactaaatgttctttttgctcatatggaaacagatccataaagttaattctcgttcctctagatttcaagctgtgcacgatttcgttcattctggcttcgattggtatgtcctgtcttgtaattgttgtttccatcggcctgtttatttttttgcgtttcagcactttttgaaaagctccgatcatatcatagaccgtgacagagagcttttgctcagactgttttacttcttttgcatattcactcaaatcactcggcggtttcgtgaacgatttttgtctttcttcttcccgttcttttaaatccttcgccgcatctttatattttcggtactcaatcagcttttcaatcagttcctcccgcggatcttcttcttcaagtaattcatcttcaaaaagctcctcctcttgcttcgggagcagcattctgcttttaatgctgagcagcgtggcagccataaccaaatactcgctggcaatgtcgagctcaagcacgcgcatcgtatgtacatataataaatattgttcagtgatcttcgccacaggtatatcatatatgtcaatttcaagacgattgattaaatgaagcagcaggtccaatgggccctcaaacgtatcaattttcacttgatattcttccatcatctcaccattttcaagtatcactctcattgccggaaaaactggctaccctatagtataagccaccaaaaagctctcgtccaatactatttcatatcctgttttgaaggagtttgtacagaatattcaaaacacaagaggtgtttgctcggagcgcagaagcgggagaaaaagcctttgcttctggttttcctttctaagaagcactagaggccgggcgttcttttttccttttatcccttctatggtacactaaaagcacattaaaggaggaagcaccttgtatccgaaagcttatatagattatctcgttgagtttcatgcgacacgggattattttgaatgccatgaaatattagaagaatattggaaggaagatccgccaaagaaacgaaaacgctattgggtgggctttattcagcttgcagtggctttatatcatcacagaaggcagaatacagccggggcaaaaagactgatggcgaacagcatccggattcttcaagcagaacaccgggcagtcgaagacttagggcttgatcatggccgtttgctcgaacttatgcaatcggtttacgaacaaatcgaaaccgtctctgcctataaaagcattatactgccaatcaaagatgagaaactggaggaagcatgcaggatcgaatgcaggaaaaaaaagtatacatgggggcagcccagtgcactcagcaacatatttcttatcgacaaacaccgtttgcgggatcggactgacgtcatccgtgaacgtgaaaaagaaatagaacgcagaaaaaaaagcagagactgatcacagcctctgcttaattattgtatgaaatgtcttgatcctgctgaccttgacaacgttcgaaaaagctctgcgttaattcatttggaaccagtacttgcgttttgaataaatgctttaaagcatccatcatctgttttccgattccttgatggcgatgagaaggattcacactgatatgccggatctcaacctcagaatcctttttttcgactccgattgctccgacgatatcctcgtcctctttccaaagaaagagctggcggtctgtatccgtttcgtagtccttaattgtctgctgaagctgcttaaggtctttttcattcggcataaacgaaagaagccccatcgcaatcttttcaaacgattttttataacgaattaacataaaaacccctctatatccaaaatgtccagtctgctattaacggatacgaataggtgatccgttttctcacattatatcattttcgccatatttttaaactgttttcagcaaattattcaaatgagcggtttaaatttgccatttcaatggcagaaacagcacaatctacacctttgttgcccgcttttgtgccggcacgctcgatagcctgttcgatgttttcagttgttacaattccaaagatgacaggtacaccagtagtgtttgctgcttgcgcgatgccttttgcagcttcattgcagacataatcgtaatgtgtcgttgcgcctctgatgacagtgcccaatgtgataatagcatcatatttttttgtttccgccatttttttcgcagcaaacggtatttcaaatgcgcctggaacccaagccacatcaatgtcatttgtgtctacgccatgtctgagcagcgcatcttctgctccgctcagcagcttgctcgtaataaaatcattaaatcttcctactacgattccgattttaagacctgtaccaactaaatttccttgtatgatattcatatgattcccatccttttttgtgatatttgtgattagaaatgaagtaaatgacctagcttgttcattttggtttgcaaatattttttattgtgttctttcgcctccatttgaagcggcactctttctgaaatactgagtccgtagccttcaaggcctgcgatttttcgcggattattcgtcaaaagcttcatattccggacaccgaggtcgcgtaaaatttgtgctccgatgccatagttgcgaagatccggcaagaatccaagcgcctcattggcttctacggtgtcatagccttgttcctgaagcttataagcttttaatttattgattaaaccgatgcctcgtccttcttggcgcaagtacaggagcactccacggccttctgcggcaatttggttcagcgcggcgtgcagctgcggtccgcaatcacagcgatgagagccaaacacgtcacctgtgagacattctgaatgcacccggaccaataccggttcttctccgaacggcacatctcccatcacaaatgcgacatgctcttttccatctacctcatttgtgtatccataaaccttaaatgtcccaaaatcagtaggcagcgtaatgtcaacttcacgctcgacaagtgttgtcagattgtaacggtattgaatcaaatccttaatggtgatcatttttaattgatgctttttcgcaatttcaatgagctcaggcactctcgccatcgttccgtcttcattcataatttcacaaatgacgccggctcctggagatccgcaagcttcagcaagatcaacagcagcttctgtatggcccgctcttttcaggacacctccttttttcgcaatcagtggaaaaatgtgccccggacgctgaaaatcagatggcacggatttgctgtccagcaatgcttgaacggtaaaagatctttcttgagcgctgatacctgtcttcgtttcacgatggtctatgcttacggtaaatgcagtgtggtgagagtctgtattatgctcaaccatagggtgaagatcaagcctgtctgcgatttcctcactgagcggcgtgcagatcagtcctctcccatgtgtcgccataaagttaatgacttccggcgttgcatgctcggcaagagccacaaagtctccttcattttctctgtcttcatcatctacaacgatgatgacttcgcctttttttaaagcgtccagtgcttcttctatcggatgaaacatgcaaatcttcctctctaaaagccgttttcgcttaagaaggcttttgtaatggtttgttgggtcttattttcattggctttatgcaaaaatcgatacatatattttccgatcatatcgcattcgatattcactttagagccgatcgttttttctgaaaagatcgtttcgctgatcgtatgcggtattaaggagatcgtcactgtgtcttctgtcaggccgaatatggttaagctcacgccatccacagtaattgatccctttaaaaccaatgtttttgttaatgacgggtccatttttaaatcatagtaaactgcgttgcttttctcttcaattcgtgtgatttccgcagttccgtcgacatggcctgagacgaaatggcctccgaaacggccgtttgccgccatcgctctttccagatttactttgcttccttttgttaaatcattcagtgacgtagctttgactgtttcaggcataacatccactgtgaattgattttttgtaaaatcagtgacagtcagacaaatgccgttcactgcaatgctgtcgccaagatgaacatcctctaaaatctttgagcatttaatagttaaggccattgcatgccctgcttttttcatggattcgattgtgcctgtttcttcgataattcctgtaaacatggtcaccatcctattcctttgtcggttttgccgtcagtttgatatcacggccgatttgggttatatcagtgaattgtaataaggggacatctttcattgattgaaaaccttcaccggagattaagctgggagcatgcgttcctccgattagtttaggggcaaaatagaagatgatttcttgaaaacagccttctttgacaaagcttccgtgaacagctgaaccgccttccacatacaccgacatgatgccttcttccgctaggatcttcaaaacatcaggaatttgaatgcgctcggtttcaagtgtaaatatgttcactccgaaagctgaaagccgttttttcttttcctcgtctgcgcgtgccgtcgtaaaaatccatgtcggcgctatttgatcgcaaatcactttagcgtcctcaggaatcgagagtacggtatcaagtatgacccgaaccggctgttttgttacattcggcagtctgcaggttaagctcggattgtcggctttcactgtgccaactccgactaaaatgctttggtgtgttttcctgtattgctgagcatcctgtcttgcagcctctgacgtgatccatttgctgtcacccgtgctggtagctatcttgccgtcaaggctggcagccgcttttagcgtgacgtacggaaggcctgtcctcataaagtgcagaaatttttcattcagcctctccgcctggtctgccaggatgccttcccttacctcaatgccagcttctttcatcatgctgatccctcttccagccacaagcggattaggatctctcatcgccacgaacactcttttgataccagagttgataatcaattctgcacatggcggtgtttttccgtaatggctgcacggttcgagtgtaacgtaaatgtcggcaccctctgcatgtgctccagccatatggatggcatgaacttctgcatgagcttcaccatattttaaatgggcgcccattccgacaatttgtccgtcctttacgacaacagcgccgacgagcggattggattcggtctgtccttcgccctgcttcgcaagatctaaggccagcttcatataatactcttccatttgtttccctcccctcttttgttatttaccgtcaaaaaagccccgaatttataaaaaattcggggctttaggtattttacgcaataggaaataacactatgcatttttaaacattttgcatagcggctcatcatccttctcccatccagactttcactgtcggcttcagcttaaactgaatccaccgcgtgcttatgcacacgggtcacgggctctaaagcaaatgtgctttactaccgccggtcgggatttccaccctgccccgaaggatacaatctttattcatttgtccttattggttattatagcgatcctttttaaagtacgcaatgaaataaacttacaatttgagaaaaacaaaacatcacccttcgatccgaaaggtgatgttttttaatcattcacttttgcaaccttgattaatccgtcgatccgctttgatttgctgaagtaagccttaatcttgtcaccttcttttatatcagataaatcctgatttaatttttttccgttgaagatgattttcgttccgttttctgctactccatgatactctgagccgtcaattttcgtcactttatattcctggatggtgtattcctcttcttccgaggacaaggtttgtccaattgctgtcggaacatccttcagctcaatatcatttatgtacatataaccgcctgcaagtaaaagcaaaagcactaacagaatggtaatcttggtttttattcttcccatttctaaacctccagccaatatgaatctattcattcatatgagttattcctttttttcatgaataaaaaaccgtaaattctcgtaaattattaatataacgatgcataacgggaatatgtttcacatttctgcaaaaatttcttttctatagatatacgaatttatgttctgtttttaggggatgaccgtaaaaaagatataaaaaaagcagccccaatgggaagctgcttgatcctaatttgttttgcgcatttcgttaaacgggtagaaaacaaactttgacgtacccgcaatttgttttttcgtgaagaggccaaggccgttacggctgtccatggaattgcgacgattgtcacccatcacaaaatacttgttatcaggcactttaaccgggccgaaatcatcggtcaaatggtcaaaaccgtcctgtttcgctctctttttattagccgccaaataaggttcgtccacctttttcccgttgatatagagctggtcatttttcatctcaaccgtatcgccgggaaggccgataatacgtttgacatagtgaacatcatctccgtttaacacgacgatgtctcctctatcaaactcgccgatgtatttgactgtcatattaacaaaaaccctttcacggttgtgaagtgtaggatacatagagtcaccatcaacgacatacggcgcaaaaataaagttgcggatgagcaaagcaagaacgacagcaatcacaattgcttttgcccattctaatattgactttttcttcgaaacattttctgatttcaactgatttcctccaataaacaacggtcttcaatttatgttatcacgaatcgaaaaaaaatcccattaggaccattgaagtgattttacaaactgttaatcttcatcttctacccacatcatgcctattttttcttgtcgatcataactaggcctgaaaatattgaaagaaatgaatcgcataattcagaagcgatggactcagaagaaagagagttctcatatgcaaaatctttagatcgtatataaagcatgaggttacgggcagtttgttcatttactgcattccattgatctcccagtccatgatacccatggcacttgacaaaacaattaacgtcatgaaggttactggaatgtttgcggcaacctatttcacaggtgataaccgcaccccgttttttgctttcataatatgtttaaaatcattcaagctcgaaaacatggatcagcctccaaaaaataaatccaatatattcccggcagttgaagactctttattataaaactctgaatatccgcagttcttacagtaaaccactagaaatcggttatgctgcacgtcaaacagctttgataatcccgtgccggttgtagctatttctttttgtccggcttcagtactaccgcattttatacagcctttgttgttcatatcgcgatctccttttcattacatcacgtttgtttgatttattttactacaaaatatcaatcccaatgacccgtactactttaaagtttacttaattttgattacatactaattgggttcgtttctcagcttggtaaatcttctggagaaacggaaaagctccatgaccaaaacattcaaactcagccaaacaccgccgaaggcgtaacccgcagcaacatcactcggatactgctcataaagtacacacggctcagcccgatgaggaataaaacgataataaacaaaaaaatgcaacagtttgcagacgcgtcttgtgagaatgacgaacaaaaagataagcacaaaaaccaaaaatgacaaatgccgttaaagtctgttcgctcgggaatggatataatacatgactttccaaaggagcgtgaacaggatgaagggaatgaaagagccgtctgattccctcttcataaagctccccaccaatgactaggaaaaataagaaagagagttcgattttccgatcttgccctctgaataccgtccaaaaaaaagttagaacaataacggctaacagaacacctctcgacgcaaaagctttctgaattgcagctgggcccagtctatacccgatccaatacgacatgctcactcccacagctccccaatccggccgctaacatgcttagcacccagtttaacttttcttgaaacacgagaacaccggcaaactctcccggtccaagtaaagctagaagctctaacatcaagacaataaacaagacggcatatccgtactgttcgagcaaccccgtcaaaacttgcatgtgattctccttaaacttttttgttcttttatcattcccaatccactttttgtataatcagcacaattttatcttcagtcgtccaacaacattgtctatggcgggatcttctctcatacattcttttttgacataggaggagcaatagcatgaaatgggaggaaacaaaagatacgcagggagtttgccaaaattttgggcagttcgttctgccaccgagtcaggtgtttgtttgcccacctcatcccttgtcaattccccatttttcccgtttgaggttcgaaatggtaaagtatttcacttagtttcttacatgaagaggtaaattctttgctcaccgaactaggatagcggcgtatggcgatttctacattgcataaccactggttatttagtgagccgtgagcaatgtatatgcactttgagtcagcacaggatgatcctattacattcgccagaaaagcagctgccgcattcagagtagttaaaagaatagacagatatctgggcttccggaagctttaaaggaggctcttttttcgagcatttttataaatcaataaaaacaggcatctcctaaatatttttgccgataagtttacgctaatcaactctagcactaatacatataaaaaatagaatgatatgaaaggagacttgatagtatgattgattatcctattaatataaacaacgtttccgggaacagtgtaattaacgtaggcggcgcttttatgatcaggcctttaactttgtccaaatctgtgtttggctccggaggtttaaacacaggaattgtctttgaaaataactttgtaagcaaagctaaaatgattaatcatcaatttactgatcaaaacgtcaccaaaactttttaatgtattcaatacacgggggtcactaactaaacacctggttttgccaaccgccatcagcattcggcggttttttattgaacatttttggccaataaaaaaagcttcctctctaagaggaagccttttgcctgccgattagccttctacacgaacttctttcatgacatcgccattagacatgtttttcgcgaattctaatccgcttgttactttaccaaatacagtgtgaacaccgttcaaatgaggctgtggctcatgaacgatgaaaaattggctgccgccagtgtcttttccggcatgtgccatagaaagtgcgcccgcctcatgtgtatgcgggttgccttctgtttcacatttgattgtgtatcccggaccgcctgtaccagttccgtgcgggcatccgccttggctgacgaagccagggatcactcggtggaatgtaagcccgtcataaaagccttcgttcgcaagcttttcaaagtttgcaacagttccaggtgcagcttcaggataaagttcaaattcaattttgttcccgtcttctaataaaaagtaacctgttttcaattgtatgcctactttctttattttaattttcaaaggagattatgtataggttatagcctgtctctccttgtcgcggctattataccacacctttcgggggaaaacgaatctcccgagctttactaaaaaataaaaatgaaacctgaatctctttatctccgtctaacctaacggaactgtatttttcatgattcaggtcctcacaaagcagcactatccagctgcttgtgaaattgaaggaggtcaaactgctttgaagaaaatttggattggaatgctggcagcggccgttttgctgctgatggttccgaaggtcagtctcgcggatgccgcagttggagatgtcattgtaacactgggtgctgatttgtcagaatctgacaaacaaaaagtgcttgatgaaatgaatgtccctgataatgccacaacggtaaccgtgaccaataaggaagaacatgaatatttaggaaaatatatatcgaacgcgcaaatcggatcgagagcgatttcttcatcgtcaatcaccattgccaaaaaaggctccggattgaatgttgagacccataatatcagcggcatcacagatgaaatgtacctgaatgcactgatgacagccggtgttaaagatgcgaaggtgtatgttacagcaccgtttgaagtatccgggactgccgctttaactggattgattaaggcgtatgaagtttcttctgacgaagcgatctcggaggatgttaagcaggtcgccaaccaagagcttgtcacgacatcagagcttggagacaaaatcggtaacgaaaatgcggcagccctgattgcaaaaatcaaagaagagtttgctaaaaacggggtgcctgataataaagctgacatcgaaaaacaagtggatgacgcagcttctgatttaaacgtcacacttacagacagccaaaagaatcagcttgtctccctattcaataagatgaaaaacgctgacattgactggggacaggtcagtgaccagctagataaagcgaaagataagattacgaaattcatagaatcagatgaaggcaaaaacttcatccagaaagtcattgatttcttcgtatctatctggaatgcgattgtatctatattcaaataagaaaagcgccgaaaaatcggcgctttcttttattgctttacacccgttttaaatggcagatcaagttttacaatatcttcgtatgtttctcgcttcacgactaaatgagcctcaccgttttcgacaaatacaacggcgggtctcggaatacggttataattgttggccatgctgtatccataagcgcctgtacaaaaaacggcaagaagatcgccttcttttacttccggcaggtcaatatcccaaatcagcatatctccgctttcacagcactttccggcaattgataccgttttgtcatgcgcttctccgatcctgttggctgccgcagcttcatatttagcttggtaaagcgcaggacgaatattgtcgttcatgcctccgtctacagccacatattggcggacacccggcacttctttttgagagccaaccgtataaagagttgtgcctgcgtctcccacgagagaacggcccggttcgatccaaatttccggaatgtcaaaaccgtaacgggaagcattttctttcacagcttcgataattttttcaacgtattcagtggcatgaagcggttcatcatcttccgtataacgaatgccgaaacctcctccaagattcagcaccttggatacaaatgaatatgaatctctccattcgtctagttttttgaagattttttccgctgctaacacaaaaccggccgtatcaaagatttgcgagccgatatggcaatggacacccagcagctgaatgtgttccgattgtaatacttgttcaatggcccgttcagtttgtccgttatgaagatcgaaaccaaactttgaatcttcctggcccgttgtaatgtagtcatgcgtatgcgcttctactccgggcgtgatccgaagaagaacatcgatggagtgacccgtttctttacataggtcttcaagaagcgcgatttcatagaaattatccaccacaatgcagccgatgcggtgctcaagcgccatccgcagttcttccctgctcttattgtttccatgaaagtggatgcgttctgccggaaagcctgctgcaacagccgtatatagctctcctccggatacgacatctaaagaaagtccctcttcctcagcgagctgaatcattgcgactgatgagaatgctttgctcgcatatgccacctgtgctttcagccctgcagaaataaacgcctgcttaaagcttttagcacgctcacgtattaaagccacatcatatacgtaaagaggtgtaccatatttctccgctaaatagagagcatccacacctccgatttctaaatgaccatgttgattttgtctgcttgtgccgtgtaagaacaatgtcattccctctttctccgcttatggatgaaaggacagttttatggactgtcccttcataattaagacatacattatcatactcttcagtcagtttcaatgcgattatgaattggtaggctgccttaagcgatttttggggtgaacgatgctgggtcttacttttgcgccaggtttcgctgtgcggacaagaacctgccacagcgcctttccgttaaagggaatcagcggccataagtacggtgtctgaagggatttgatgcttgccatggcaataattagcactgtaaatccgatgacgagcccttttatatgaaataaagcaacgagtatcatgaggacaagacggctcattttgtttgccaagcttaattcataactaggcgtcgtaaaggttccaatcgccgcaagtgagacgtacagaatcacctcaggagaaaaaaggccgacctcaatcgcaatctgcccgatcagaacagcggcaattaaacccattgctgtcgataaagccgtcggtgtgtgaatggcagccattctgagaaactcgattcctaagtcagctaaaaatatctgcaggatgatcgggatatgcgtatctttatttaaaccgataaatttcatgttgtccgggagcagatcaggctgaagcacaaagagaaaccagatcggaagaaataaagtagaagcaagaataccgaaaaatcttacccatcttaaaaaggtcccgactgaaggcgcctgcctatattcttcagcatgctgcacatggtgaaataaagtcgtcggggtaatgatcacactcggcgatgtgtccactataatgataacatggccttctagaacatgatttgcggccacatccggtctttctgtatagcgcacgagcggaaaaggattatagctttgattaacaatgaattcctcgacagttttgtctgccattgttaatccatcgacatcaatggatgcaatttctttttctacgatctcaaccagatccggatcagctatatcttctatataacaaatgcttaaatccgtctttgaccgctcaccaactttagtcatcttgactcgaaggcgttcgtctctgatccgccttctgagaagggccgtattgacgacgatattttcaacaaatccgtctctggctcccctgaccaccttttccgtatcaggttcttccgggtttctgcccggatagcttctgacatcaattataaatgcgaagcctgcaccttcaacaatgacagcgacgagcccggacagcacttggtcggtggtttcatccaaggtttttactttttcgacctgggcgttaagcagcctgttttcgacgatgtcgaccagctcatcagggtcttctttccgattgttaatggcaacaagctctctcattaaatgaataatataggctgtatcgcataatccatttagatagtaaagctggatctctttatctaaaatcgtgagcttgcgaacacctacatcatagctcgtccccatcccaacacggtttttgaaatactcttcatttttagctggattccgataaacccgaattttctcttccttgtggtccggcatgatacccgctcctttctaaaataaactcgaccgctttcatggtgattggcgacccttttgagatatcgtcttttctgcccattttgccgatatccccgataccgacaataagcgggagatcaagtttatcaaggcaatagactgtatctccactcattctgtggtcatcaaattccctttccccgactttatcgacgccgtattcagttatttctccattgcggtcaatgcttacatcgaccctggtccattcagcctgatgtgtttttgacgcgaccgcaatcacaccgagcacttcaatagacggatgggttgcgacataggttagagcggcttctcccgggccctctccttgaaggccggagtcgtcaaacatgacaaatacaggatcatacggtgctgaggcgatcagcttgacaagctcggcgccgctgcgggtggaaggattcccttttgattgtgaaatacatcggcctcccactttgcttgcggcgtattcaattgttttagcggcataaacatccccgtctgttaccagtatgaccttgcgttttgtcgtcatgtcggcattatcctttcggtttgaaaataacagctacgataaaggcgaaaagaatagcggctgagataccggccgaggtcagctcaaaaatccccatgccgattccgataaatccgtgtatatgcgcctgatgcatggcgccgtgcagaagactgtgaccgaagctgacgatcggaacggtggcgcctcctccggcaaattcaataaatttatcgtaaatgccgaaaccatctaatattgcaccgattacaacaaatgatgtcatgacatgagctggcgtcaatttaaaaatatccaagagcagctggccgacgatacagatggccccgccgcagacaaaagccaaaaggtagtccatattaagatgcacctcctgcacgctcaaatacaaccccgtgggcgatagtcgggatggtttctttttgctggatcatcgtcgggcttaatagcgccccggtcgccacgacaaatacacggtttagttttccttctctcagctgcttaaaaatatgagagtaggtgacaaccgctgaacaagcacagccgctccccccggcaaagacctgctgatccggagtgtaaatcagaagcccgcaatcatcatgctttgtgccgactggatatccatcttcttttaaaatgtcttttacgattggagaaccgacgcctgacaggtcacctgtcaggattagatcatagtcatccgctgtccggttgagatctttaaagtgctgcttaatcgtatcagctgcagccggagccatagccgatcccatatcaaaaggatctgtaattcctaaatcagaaaccttcccgacagtcgcacttgtgatttggatatcacccggtgtctgactgatgacaactgcaccgcttccggttacagtggaggtagcagtgtccggtttttggcctccgtattctgtcggatagcgaaactgtctttccgcagttgcattgtgactgctggtggcagcgagtgcccttttggcaaaccctccatcaactaaggctgatgcgacagccactgtttccattgatgttgaacaggcgccaaacatacaaagaaatgggattttcaagtgtcttgccacatagttagccgtcacgttttggttcagcaagtcgcctgccagcaataggtcaatatcatcttttgtcagattgtttttttgaagtgcaacattaacagcgtcttccatcagctgccgttccgccatttcccagcttttttgattacaatgcatttcgtcataggttttatcaaataaagagccaagcggtccgtctttttcctttggtcctgctgccgttcccgctgagttgacaaatatgggatgttcaaatacccaggtttgctttcctgttaatttcattttcttctcctcctatgacatcagtttctcaaaagcaaaccgaatcattccaacgatgtatgcagctacaactccgaaaacaataacatttcctgccagtttaaacatatttgtcgctactccaagcactaatccttcgcttttatattcaagagccgcacttgccatactgttggcaaaacccgtgacaggtacggctgaacctgcgcctgcgaattgtccgattctgtcatagattccaaaccctgtaagcagggcagaaattaatatcagcgttgcagctgttggattccccgcagttttttcattgaaatcaaaaaaatggatataaaaattttgcagaccttgcccgattgcacaaatcagtccgcccactaaaaaggcttttacacagttccagacgtaaggcggcttaggctgatatgttttcacttttgatttgtaattttcttttatgtttgtcatcttgaaacctccttatgaatggtcaataaagtacagccagtgaaataaagatcccgcgattttcccaatcacgatggccattaacagaataatgattttacttctgagcccgattcgtttcgccaaaatcggcaggacatttaaaacctctgtaagagcagccgctagcatcccgacgaacaaacctgccagaagcccgaccggcacagctatccattttgttagataaagatgattcatatgaagcgtctcccatcccccgcaaaccgcgccaagaataacagccgcttcataagcctgaacaaatctcattgttttggtgagctgcatcagccgcggaatgattcccattacggttaaaaaagcaacgaaacccgcccccaccgttatgcctccgccgagcccgacaaaaatgatgaacaatacactaacgatcatgcagatcctttatggtttcttgattctcatgcatggccacatattgatcgagatcaagctgatagttaaacatctcaacctccagcgggctgggctcttcatttaggcgctttttaaatatgtggttaaaaaacacgatcatccccagtcccaaaccgatgctgtatgggatttgaagcaaatatggatagtcattcctctctccggttatgatttcatatagtgcgatatgaacatctctcatgcttacatcctcatgaaagttcatgatggcaagacacgatccaataaacagaagcagccagacaccgataaatagaaccgttgataaatttcgctttcgatactgaatttcaacaatggtttctgctccgcctacggtttgaacatcaattgtcgggtcttgtaaatgaatggctctgaggacttgtatgatatccagaattacgatatttttatctttttcgctcacctgataaagcggcatagccgaaagtttctttttcagctgaagctgcccttctatttgcgcggcatctccaacggtaataatatcccctggatgtgccagcactcggtggcgaagccggataaatattcgtcgttccatcattgatcaccatctttcggtggttatatatgtagtatgtggttcgattttgttctcattcatccgctcgaaaagaccataaattaccacgcttttgcacaaaaaagctagcctgcactgcagactagccatccgtatgatccatttgaaccttgatctgttttaatattttcttttcaagcctggaaacctgcacctgagagatcccgagccgctcagccacctcggactgtgtctggtctttataatatctgagatagacgattagtttttccctttcctccaaatcgctgatcgcttctttcagcgcaattttgtcaaaccatttttcttctgagttgtcagcgatttgatcaagcagggtaatcggatctccgtcattttcataaacggtttcgtgaatcgaagatggagcccttaccgcctcttgggccagtacaacatcctcagcttcaatctccaaatggtcagcgatctcctgcaccgtcggcactctgcccagtgttttcgaaagctcatccttcgcgcgccggattttgtttccaagctcttttaatgaccgtgatacctttacggttccgtcatcacggataaatcgttggatttctccgataatcatcggcactgcatacgttgaaaaacgcacatcataggttaaatcaaatttgtcaacagattttaacagcccgatgcagccgatctggaagagatcgtcaggctcatatcctctgtttaaaaaccgctgtacgacagaccaaacaagacgcatgtttttttctatgaggaggtctcttgcctgctggtcgccattttggctttgtttgattaattcctttacttcatgatccttcagctgagcgtttttgccgtttttcttaacctccacatccataacaaatctccttaattacaaagcgctttgctttttgataagtgctttgttaagcgaatcgttgttcccatttcaggcgatgaatcgatactgacatcatccatgaaattttccataatggtaaagcccattccagagcgctcaagctcaggcttagtcgtaaatagaggctgacgggcttcttcaagatctgtaatgcctaagccttcatcacgaatagtcatatatacgacatgatcttccagcgtcactgaaatgtaaactttcccttcacagttctcttcatatccatggataatcgcattcgtgacagcctctgacacgactgttttgatttcagtcagttcatccattgtcgggtccagctgagctataaatgaagcaactgtcacacgggcgaacgattcattctgactgagggcagaaaactcaaggtgcatttcatttttcatgatgccacccccagtgtcaggagtgcctgctgttcagattgttcaaatcggataattttaaacagacccgacatatcaaacaatcgcttcaccgcaggagagatagcgcaaacaaccatttctccgccaatttgcttaatttgcttgtatcttcctaaaataacgccaagccccgagctgtccataaaggaaaggtcctccaagttcagcacgatatggcgaatatcatccttctccaatgattgagtcactttttgcttcagggtttcagccgtatggtgatcgagttcgcctgttaatcgaatacaaagcacagattctttgacattcatgtcaattccaaggctcatgctcattcctccttgatatgatcggataatgagtgtttcgatttcgacggaatgaattccttcaccgtgacaaaactagtggtcattcggcataattacttaaattttgtccagtctcccatcgtccgctttaagaatgtgataaacccggctttcttcatatcttcttttgcagcaacaggactttcagcgagtacttctccatcctttttcagaacaagagtgccaagctcttggcctttttgaatcggagcactaatattgtccttcatcttgatttcttttttcacatcgttcatatcctcgccttttttcgtcaatattgaaatcggctcagatgtagtgagttcgataaatttttgtttcccttttttgacctttacttttgctactgtttgatttcgtttatataaaggatgcgtttcatattggctaaaggcgaagtcaagcatttttgtcacttgcgcgtttctttctttaggcgtgctcgctccgaatacaaccgctatggcccgcatgtttccttttttagccgaagcagtcagacaatatttcgcttcgcctgtatagcctgtttttacgccgtctacaccaggataaaatttgataaggcgatttgtatttacaagccaaaactttttatctgtattttcacgcagataatcttcatacgtgccggtaaacttcgtaattgattcgtatttcaataattccttagccatgattgccatgtcataagcagagctgtagtgtccttcctcggtcagtcctgttgggtttttaaaggatgtatttttcaatcccagctcttttgcttttttattcattttcttcacaaattcttcttcagagccggaaataaattcagccatggcgacggaagcgtcatttcccgaagcgattgcgatgcctttcagcatttctttgacagtcatttcttcgccgggctcaaggaatatctgtgagccgcccattgacgccgcatgctcgcttgtacggaccttatcactcattttgattttgcctttatctaaagcttccataatcaaaagcatcgtcataattttcgtcatgcttgcaggcgccagtctctcattgctgttcttgttgtaaagcacttttcccgtgtcacgttctatcagcaccgcagacttcgcttcatgagcaagctccgatgtacgttttccgtcttgttttgcaaatgcagacggtgcaaatgtaagcagcattataccaatcaacaaagtggataaaagacgtttcatctcaaaagccctccatttcataatcctttttattttttccaagcgtgatggttttatacgccactgatggaaaatgtttcgaattttgggcataaaaaaagacagctgtgtgatatcagacacagctgtcttttggtcctgcattgattcatatttattcgtactgagcgacgatcgctttaacaagctttaagaatccagcttttactttttcggtcacttccataacttcatcgtgacttaaaggctgatccagaattccggctgccgcgttagagatgcaggaaatgccaagaacccgcattcccgcatgattcgctacaatgacttccggaacagtagacatgccgactgcatcagagcccatcgttcttaagaaacggacttctgccggtgtttcgtaagaaggtcctgtcacagcagtgtacacgcctttttgaattgggatattaaggtctttcgcaatcttttcagccaggctggacagatctttgtcataggctgaagacatatctggaaatctggcgccgaaatctgcttcgtttggcccgattaacgggtttgttcccataaagttgatatgatcggtaataatcattaaatctcccgcacggaattcagtgttgacaccgcctgcggcatttgtcacgatcaacgcttccacaccgagcgctttcatcacgcgtacagggaatgtgactttctccattgagtagccttcataaaaatgaaagcggccctgcattgcaatgacggaaactccttcaagagtgccaagcacaagctgtccggcatgcccttcaacagtagataccgggaattcaggtatatcttcatatttcagcttgaccggattttcgatttcgtccgccaaaatgccaagacctgagcctaaaataaggccgatctttggagattccggcaggttttgtttaataaaagcggctgcgcgttcaattctgtccttcaagaaacagtccccctattgtaataaagataaaaagcttttcccgtatttcggtttatttgtttggaaattatcagcgatcgttgcgccaatatcggcaaatgtatctgcaagcggcagcatttgcgctttcttatgttttttgctgtaagcgagaatcggcacatactcgcgtgtatggtcagtcccatgatgaatcggatcattgccgtggtcggctgtaataattaacagatcgtcttctctcattttttcaaacacttccggaagccgcgcatcaaattcttcaagcgcgcgtccgtagccttcagggtcacggcggtgtccgaataacgcgtcaaaatcaacaaggttcgcaaagctcagacccgtaaaatcttctcccagcgtatcgatcaccttgtccattccgtccatattagaaaccgttctgcgtgaagaagtaatgccttctccgtcgtaaatatcagagattttaccgattgaaatcacatctaagccgcagtctttcaattcattcatgacagtgcggtcaaacggcttcagcgcataatcatggcggtttggcgtccgtttgaattgacccggctctccgacgaacggccgtgcaataatgcggccaaccatatatttcggatcaagcgtcagctctctcgccgtttcgcaaatgcgatacagctcctcaagcggcacaacctcttcgtgagcggcaatttgcagaacagagtcagcagacgtgtaaacaattaaagcccctgtctccatgtgctcctggccaagctcatccaaaatcgctgtgccggaagccggcttgtttccaataattttgcggccagatctcttttccagctcttgaagcaattcatcaggaaagccttccgggaacactttaaacggtttatcaatgtataaacccataatctcccaatggccggtcatcgtatctttgccgtttgacgcttcttgcatttttccataataggcaagcggatgttctgttttttctacacctttgatatcttcgataagaccaaggccgagctttgccatattcggcatatgtaatccgttcatatgctcggcaatatgaccgagcgtatgagcgccttcgtcattaaagtcagcggcatccggcgcttcgccgattccgactgagtccatcacaattaaaaacacacgattatatttgtatgcaggcatcttgaaagcctcctttttttctatacgtctattgtatcgctaagaggtctgacaactcaagtataaaccgttttcattcccgttgacaatgtatttggaaataatgagaaacttcaatattttctgtcgctctaaacaaaaaagccgcagccacctgcggctatgctcgcggatgaaactgcttgtacacatccttcagccttgttttcgtcacatgcgtataaatttgcgtcgtggatatatccgcatgaccgagcatttcctgcaccgctcttaaatctgccccgttctcaagcagatgcgtcgcaaaggaatgcctgagtgtatgcggagtcagctctttcttaatgccggcttccaatgcgatttttttcaggttcttccaaaatccctggcggctgatctgtttgccgtgatgatttaaaaagagggcgtcagatacattattttttaacagttttcccctggcttttgtcatatattcctcaatggcggaagcagcggcttcaccgattggcacaatccgttcttttcttcctttgccgaagcatcggataaaccccatagataaatgaacatcagccgttttcaattcaatcatttcactgactcgtatgcctgtcgcataaagcagctccagcattgctttatcccgatatccgaaagggctcgtcagcttaggcgtgtccaataaccgctcgacttcattgagcgcgagcaccttcggaagcgcccgttccgtcttttgtgtttcgatatgaacggaagggtccttatccgttactttttccctgagcagaaattgatgaaaagagcgaatggatgccaaatgccgcgccgatgtcttgccggatttccccgagtccttcaaatgctttaagtattggataatatgtatgcgggtaacgtgattccaatctgtaacatgaagggtttctgttaagtagagagaatagcttttcaagtcacgttcataggatacgatcgtattttgagagagccctctctctaccataacgtagtggatgaaatcctttatttgatctttcactcttgatctactccccgttttggtaaaaaaagatcaaccggtcgaaccatccgcctttttcatcctgatccatttcaacaacttttacagcggagccttccggtttatcataccgatgatagttttcatactcttgattcacccatatcatagcataatagaacaaagcggtaaaaccggtaaacaggatgaaaactttcaatgcatcgacagctgttttcaggaatcttcccatgtcctaatcgatcctttccctatggttccagttatataaaccatatgccaaatcagaaaggttttatacatagaaacagcaaaaaaccctttccccatgagaaaaggttcgcgctcggcaccgtctattcagtttcttttccgttacagcggtggcaaatgccgtgaaacgtcaatctatgatctttaatcttaaatttccaatcacgttcaatgatttcttccacgtcttcaagcaaatcttcttcaatttcatcaacggctccgcactccatgcacaccaagtggtgatgaaagtgagctgcgccctctttccgaaggtcgtaacgggacacaccgtctccaaagttaattttatctacgacttttaattcagttaataattcaagcgtacggtatactgtagcgagaccgatctcaggagatttctcttttacgaggaggtatacatcttctgcgcttaaatggtcttcttcgttttcaagcagcactcttactgtcgcttcacgctgtggcgtaagtttatagctggatgagtgcagttgtttcttaatacgatcaatacggttttccatgtctttccctcctacgccgcattccatgactcattataacaaaatacgcgcagagttccaactataattattataaactgataaataaaatggttttcttttaataatgattttaaaaaagtctagatgtaagcttttccattaaaacaggagataagtatgcttcaaagagagatgaaatcagcgctaaaaacagaatgaccagcagcacaaaggcataccgcccgaaccattgaatcggcgcgtcatgcaggcttcgtttcacgaacagctgtctgattaactttaaagaaaacgcaattgcacatgtgcccataatgagataagccggaatcagcagcacattttgcggcaaaacggagacaaatgataggaaaaacccgcttactcccatctgattgactaggaacccgacagtaaagccgacgacgatccctttcagaaagatcataatgaaaataatcggcatcccaatgacggaaattcccagtatccacatcaggcctaaatactttgcattatgaaagatactttgcccaaacatatcagctgaacttgcctgttttccatccgaaagctgtccaaaaaattgacttaagtagtagtataaatcttctttctggctgatggtcatactgttgacaataatcgcgccaaagatgacacccatgaaaaacagcactgacacaaatatataaagagagagatgatctttgacatgcctgagaaacatgtccttataagagatttttcgcataccgtttcctcccgcccgctctagtgatttgatttaatagattgtatgaaagaaacagaaaaacatgccctttttcaaaaagaaacaatagagatgaatgctaggcggctttttggggcacaaaaaaatccttatcatcaactgctgtatgatcataaggattcttatgcttccgtttattcaaaatctcttttttgctttttgtcattcttccatgtgtgctgaaagatggtgtgctgcctcttgataataagacgtcacgtccgccgtttctcaatcgatgcccccgcttctttttcgcttggctttttgccatgtgatcactcccttttttattttcatagtaatgataacaaaattgaacaatgataagaaaaaaacagcacctgctacgacaggtgctgtttagctacatttatttcactgctgtaagagctgcatgctcgacagctgctgctaccgcatgatggacttttgaatcaagcggctgagggacaacatcaccttgtttagtgcaagctgcgatggcctctgctgctgcgacaagcatatcatgattaatctccgtgctttttgcgttaagcgctcctctaaaaatccctggaaaaccgagtacattattaacagaacgcccgtcagctgcatatgcggcgccagcctgcagtgcggcctccggctcaatttccggcttcggattcgataaagccagaatcacttgaccagaacgtacaaatgccggttttattaaacccggaacgcccgttgtagcaatgacaatatcacatgtttccataagctcctcaatactggaaactgcctgtccgccgtattgttcgagacggttcattgctgactctgatttgtctgttccgtatacagcattcacaccataagccatgaacatccggcagatggccacgcctgctgcgccaaggccgatttgccccactttcgcttccttcaggtcaacccccgcactcctgcatgccgaaatggcagctgccagcgtcactacagctgtaccatgctggtcatcgtgcataacagggatgttcagctcctcttttaggcgatcctcgatttcaaaacaatgcggcgaaccgatatcctcaagaaggatgccgctaaagcccggagaaatatgttttactgttttgatgatttcttcaggatcactcgtatcaagcagtatcggaatgccgctaatacccgccagctgatcaaataaagcagcctttccttccatgacaggcatgccagccacagagccgatattcccaaggcctaaaattgcggttccatccgttacaattgcaacagaattgctgatcgttgtataaatagaagctttttcaggttctttttcgatcagtcggcacacgtccgcaacacctggtgtgtagacacgtcccagctctgccagtgaacggatcggcattttgcttttcatttggatttttccgccttcatgtgcggacaggacttcatcagatacggtgtgaagcctgatcccttctccgagggcctgtacagccgcgatcacttcctgaagctgttcttcattctccacttgaacggtaatattccgcattgtgtaattgggtccgacttttaccgtctccacttcaccaatatccccgcccagaaggccgatggccgtagccacccttccaagatttccgggaaccgaaggcgtttcgatcatcagtgtccgaatcatgtgtttcgctatcattcagtgatcctcccctattagcctagtttttcggctttaactgtattgtttttcgtataccatataaattttcctgtataaccatagataattgcaagacctattgctacaaaactgagccacataaacggcagataagagaaggtagaaacacctaaaataccagccatgtaaatcccattatcagaccaaggaaccatccccgaagtcaatgttcccccgacctctgagttacgtgataacactcttctgtccagatgtaagcgatcatagctgtcttccataattttcggagtcaaaataagagatacatacatcgcacagccgaagatgtttgctaaaaacgctacgatcagtgtagacaatgtgacattgccggctgaagttaatttcttttcaaacgttgaaacaatgacttttaacacgccgagtttctcaagcagaccgccaaaaccaaggccaaagatgatgacgacgagagaatcaagcataccgacaattccaccgcggtttaacaagccgttcaaaaattcaacatccgttttaatagagaagccgttgtacgcagttgcaatcgcatgggcaatatccattccttggaaaacaacagcccagattgcaccgagtaaagcgccaattacgataactggcatagatggctttttcatcgccaataagactatgacgagaactgccgggatcagcatccaaatatgaatgtcaaacgtgttttgcaaagatgattttaagaattcaactttatcaagatcaatatttttcccgccgtacataaatccaacaactgtaaagagtatagctgtaatgacataagcaggtattgataaataaagcattgctctcacgtgagccaatacatcgacttttgatagtgaagaagctagaactgtactgtcagacagcggagacagcttgtccccaaaataagcacctgaaagaatagctcccgctactagaggaagcggaatgcctaacccctctccaattgcgatcatggcaatgccggcagttccgactgttccccatgacgttcctgttgccacagacataatggaacaaataattaacgttgccagtaaaaagatacttgggtgaataaattccagtccgtaataaatcaaagtcggcacaacgcctccggcaatccatgttccgatgagcgccccaactgaaacgagaatcagtacggcttcaaggccatttgatatcccatgtacaatcgcattttgtaaatctttataagaataaccgagtctaatacctaaaagcattgcaataaaccatgaaacaaaaagcgccagctgtatcggcaagtcgagaaagactgtaaacgatagaacaagtgctaaaaatactcctagtacaataataatttcaaatagtgttggcaatcttacatccttcaaaagaagtcccccttcatgtaaaagctaaaacgctttcaatatatagtgcaacacgtatactatacttcctcatccctatgttgtaaacagcttattcatccgactattcggagatgaataagctgtattttatacaaattttatttttctaatagttctttccctgcgatacctggtttggtcatctcatatgggtttaaaataatatccaattcttcttcagtcagcacatcatgctgcagacaaagatcccggacagattgccctgtcataattgcttccctggcaattctagctgccgcttcatacccaagatgcggattgacagctgtgatcacgcctgcgcttttttctacgtattgcttcatacgcttttcgttggcttcaatgccttttaagcagttgtcagtgaacgaacggaagccgttgttcatgatgctgatggattgaagcaaattaaagacaagcacgggctccatgacgttcaactcaagctggccggcttctgaagcaaggcagattgtattgtcatttccgataacctggaacgcaatttggttgatcagctccgccataaccggattgactttccccggcataatagatgaacccggctgacgtgcaggcagagaaatttccgcaagtccggcgcgcggtcccgacgccattaagcgcaggtcgtttgcgatcttcgacatgttcatcatgcagacttttaatgaagctgatacctctgtataggcatctgtattttgtgtcgcatcaacaagatgatcagcgccgacaagaggaagcccgctaatatcagcaaggtgctttactacctgtttgatatattcaggatcagcgttcagccctgtaccaacagcagttgcgcccatgttgacttcatacaggtgctggcgcgattgcttgattcgtttgatatcacgctcgagaacacggctgtaagcttcgaattcctggccaagacggatcggaaccgcatcttgaaggtgtgtccggcccattttaataacagagtcaaactcctgtgctttttgcttaaacacactatgcatatcttccattgttttcagcagtttttctaagagcttcaatgtggaaatatggatagcagtcgggaacacatcgttcgtagactgtgacatgttcacatgtgtgtttggacttaaatggatataatctccctttttatgtcccatgatttcaagcgcccggtttccgataacctcattcgcgttcatgttcatagaagttccggcaccgccctgaatcggatcgacgataaactgatcgtgccacttgccttccagaatctcgtcagcggcttgtacgatagcttggccaattccttcatacagccgtttcacgtccatgttggcaagagccgcagcttttttcacaatcgccagtgcgttaatcatttcctcatggattttgtatcctgtgatcggaaaattttcagaagcacggagcgtctgaattccgtaataaacatctgcttcaatttgtttttccccaaggaagtctttttccacgcgatattctttttggccgtttaacataatctttaaccttctttctctttgctggttatcgtttttacattttacaggacaacgtcatcagctatcggcgtttccataattctcttgacgacaggaagatccgaagactgacctagcgcccacatcaattttggcacaattgcttctgtgttcatatttcttgatcggataattaagtcttggttgactctgcggccaacctcgtaaatgctcatgtcttcgccttcttcaagacattgagtcgtaatgacgacgacaatgccgctttcgatcagttcattcacttttgacaaaatgtctctgccttcaaacggcactcctccgctgccataactctcaatgacaattcctttgtacatgcttttcagggcatcaaacatttcgggctttaagcctggatgcagcttcagcagacatacatctgtgcatagtgaagtgtcaactgtgaaggtgtcgttctcaggttccgttacttgtttgttgtattcgatcccgtcttcattgataaaagcgatatatgggtaattgatgctttcaaatgcgtcgtagcttttcgttcttaatttgatcgcacgcgttccctgaatgactctgccgtcaaacacaacataaacgccgcccacgccttcacaggcaaatcgaatggcatctgtaatattttttttggcatcggttttttggaacgtgatcggaatctgcgagccggtgatgacaatcggctttttggcatgctgcagcatatacgatagtgcggcagatgtataggccattgtatctgtaccgtgagtaataacaaacccgtcataggcatcataattttccttaacggcttctgctatttccacccagtattcaggctgcatattggtgctgtctatattcataagcgactgagtttccattgtgtaatcgttatcaagttttgatacgtaacttaataattcatcagccttgactccgggagccagcccattttccccttcaactgaagcaatcgttcccccagttgtcaacatcaataattttttcataccatgcacctcttcactgtatctaaagatgggttgcgagaaggtattcgcttttcgcatacttttaatgcaattatagacacggaaaataaaatacgcaagacattattattcaattcgcgtacacttcctaatacctatatgatataatcagctcaaggtgaaaaaggagcggaagttcatgaatctagatcgtttaactgaattgagaaaaaagaaaaattggtcgcttcaatatacagctgaccttctcggtatcgcaaaaagcacatatgccggctacgagtcaggctaccgacggccttcacttgaagcgcttgccatgctggctgacctctttgacacaacctgcgatgaacttttaggccgcgagaaacaaaagcagactgctcctcaggccatagaattggccacgtggagcagcctcgactttaccatttctgttgatggccagccgctgagtgaagatgaaatcatccagctgattacctttatacgcacaaaaagaaaagtacaggaggaactgagttaatctttagctcacggtttaattttaccgtaggttcctcctcctccggctttcaattccagttttccggatctcgcttttacgataagcgccgcggttttcggcgggacaacgcgagccaaatcttcttctgcagcctcatgaagaacagccatttctgttccgaaggctttttttagtttgtccagcgttttcgggcctacacccggaacaaattgcagcgggatctgatgtacatatcgcggacgcgggacgcgaacttcaagctgatcactcaattcacgcaatctatcgctgactcccttggtaaatctggcttttccgcaattcgcgcacgctgtttccccgcttacagcaggctctccgcacgcttcgcaagccgtctgataatatttccccaataacgggtccaagccataatttgcgataattttcctgtcatcttgtccctttaatgcaagagcaaattcagtaaaatcagctgactgcacatataattcattatattctctgccgattttccccaacgaatgcgcatcagaatttgttaaaaaaggatacggattcaattgcgatacgtgtgatgccatgtctgtatcacagcttaatccaagctccaccgcgtctatcatagatggatcaaaaacctcagttaagcttgatttaaccccttttccatataagcttttatgcggcgtaaagatatgggcggggataaacaggccgcccatatcctgcacttttttttgcaggtttaagcccgtttcataaatccgctgcgagcttaaatgaatatttttcagccgggctgacagccagtttgaaaactgtttcatatcagccagcgtcggcataaatacgagcacatggatcggtccgctgcaggcttcatcataaatctccagctcgctccccaataaaagagtcgtgctgcgataacggattcctcccccgtcaagctcgcgatattttccagatgaaatgccttcctcaagctctagaatgacttccggagaatgacagtcgataatgccgaggagttcaattcctttatgttcactggcttcaaccaaaattctgtccagcgttaatgttttggcgcctgttattttgacagcccttcctgtaaaggtccggccgatatgaatgtgcaaatccgcgtaaatctttttcatttttgtgcttggagcgcttctttcagctgaagatactgaatcgcgtaggctgttttagcatcatatacttcacgcgattcaaccagctttagcgcatcttcaagcgtcacctccatcacttcaacaaactcgtcctcatcaagctcccgtttttcttcaagcacagaaagctcctcagcaagaaaaacgtgaacgatttcatctgcaaatccgggtgatgtataaaacgcagttatttttgtcagtttttttgctgtataaccggtttcctcttcaagttcccgaagtgccgtatactccggctcctcacctttttcaagcttaccggccggaatttcaacgatcgtccgctcaagcggcttacggaattgtttgaccatgatgattttcccttcatctgtgacggctagtaccgctacagctccagggtgtttcacaatttcacgtttactggctttgccgtttggcagctctacatcctcgacataaagatcaatgactttacccgaaaaaatctgttctttggcaattgttttttcttctaatgatttcatttcttcatctcccgttctgtctctatatgatgccccatacattttatcatactagagcaaaagggggcttcttcgtgaaagtgcaccgcatgccaaaaggtgttgtcttagtcggaaaagcatgggaaattcgagcgaagttaaaagagtatggacgcacatttcaatatgtgaaagattggatctcaaagccataaaagttgaaactttagctcctttatattacggtcaatacaaagcctaaaaaaggagtgtgcacatgagaaagcgcaaattgggtacatctgatttagacattagcgaagtcggactcggctgtatgtctcttggaactgaaaaaaacaaagcattgtccattctggatgaagcgatcgagcttggcatcaactatttggacacagcggatttgtatgaccggggacgcaatgaagaaattgtcggtgatgcgatccaaaacagacgccatgatattattctggcaacaaaagcgggaaaccgttgggatgacggaagcgagggctggtattgggacccttcaaaagcttacataaaagaggcggtaaaaaagagccttacacgtctgaaaacagattatatcgacctttatcagctccacggcggcacgatagaggacaacattgatgaaacgattgaagcgtttgaggaattaaaacaagaaggtgtcatccgctactacggcatttcttccatccgcccgaatgtgattaaagaatatgtaaaaaaatcaaacatcgtcagcattatgatgcaattcagcctgtttgacagacgccctgaggaatggctcccgcttttagaggaacatcaaatcagcgtagtcgccagaggtcctgttgccaaagggctcttaactgaaaaaccgcttgatcaagcttcagaaagtatgaaacaaaacgggtacttgtcctattcattcgaggaactgacaaatgcccgtaaggcaatggaggaagtggctcccgatctttccatgacagaaaagtcgctgcagtatctgctagcacagccggctgtcgcttcagtgattacaggcgccagtaagattgagcagttacgggaaaatattcaggcagcaaatgcacggcgtttaaccgaagaggaaatcaaagcgctccaatctcatacgaaacaagacatttacaaagctcatcgctcatagcagaaaaaccagcacctgtacgggtgctggtttatttatattgatgccaatccatttggctttcatttaggagttcttcaaagctcttatttttttcgatctcttttttctttctaatctgttctgctttttctcttttctgcctcttttcatcctcttccttcaattggctcttcatctccataagctttgctttgatatcggattgaaggccgtcttttagctggtgtttgtcaatggatttttgttttttcatgcagacttcccccatgttttgttttgaagccagtttatcacggagcatataaactgaacaagcagactctcttctgatcactttctcagcgtagcagtgtttaggtataatgatcttaaacacgaattgcctatatatttcgttgaaaggtgctgtgacttttgaagaaaatccttttggccattggcgcgctcgtaacagctgtcatcgcaatcggaattgttttttcacatatgattctattcatcaagaaaaaaacggatgaagacattatcaaaagagagacagacaacggacatgatgtgtttgaatcatttgaacaaatggagaaaaccgcttttgtgataccctccgcttacgggtacgacataaaaggataccatgtcgcaccgcatgacacaccaaataccatcatcatctgccacggggtgacgatgaatgtactgaattctcttaagtatatgcatttatttctagatctcggctggaatgtgctcatttatgaccatcgccggcatggccaaagcggcggaaagacgaccagctacgggttttacgaaaaggatgatctcaataaggttgtcagcttgctcaaaaacaaaacaaatcatcgcggattgatcggaattcatggtgagtcgatgggggccgtgaccgccctgctttatgctggtgcacactgcagcgatggcgctgatttttatattgccgattgtccgttcgcatgttttgatgaacagcttgcctatcggctgagagcggaatacaggctcccgtcttggcccctgcttcctatcgccgacttctttttgaagctgaggggaggctatcgcgcacgtgaagtatctccgcttgctgtcattgataaaattgaaaagccggtcctctttattcacagtaaggatgatgactacattcctgtttcttcaaccgagcggctttatgaaaagaaacgcggtccgaaagcgctgtacattgccgagaacggtgaacacgccatgtcatataccaaaaatcggcatacgtaccgaaaaacagtgcaggagtttttagacaacatgaatgattcaacagaataaaaaagcgaaaggcctcttcggctctttcgcttttttatgttacagaacgtcggtaatgccatccatattttctctgatccattcaatcgcaagatctatcgttgtaaactcctgcgtctcgaaggtcatttcatcctgcaatagccagacatctttcttgatggactctgctcctccgattgaccagtgaagcaaggtataaggatggttttgattcaggaaggatacccacgttttattttgtgctgtgttcttcattgccttcagcttttgttccacgtttcgcgtctcctactttactaatatgctcattctggggctgagcatttcagccgggcttttcagcgccaatgttttggctttttcattgtaatcgatcgtcatttgatcgtcaaaaaacactttttgcgacgattggatatacagcggaatgccgttcgtttccagctgctcgcactgtcccgttaattcttctgccagccagattgtcgggacaccgcttaccgcgcagccgcatccttctgcatcgtaacgaagctgggctttttttcccgggttggcgtcaaacgcctgctgcagtgcctgttttgctgcatctgtcacatgtatgttcataaggtgaaacccccgttttcatcattttcgctattgtagcatacaatactgccattcgcattgtttctgccttttttccaccgcttcgcattttcttctgcagtcttgatccactcatctttcccttgtatatactgattgatgctgtcagggtgctgggccgccagctgttttttgagaacggcgtattctttcgctatgtttggatgagctctgagataatctctgaataacagatgcctttcaatagcagggtttccctgttcgtacatatggacatgatgagtgcgtttatttccgcccttttggaaataacgcctgcccgctataccgttctcaccttttggtgtatagccgttggccttcatttgttcatcaaattggctcacggcttcaatgcttctgacttcaattaacatatcaatgattggcttcgctgccatgttaggtattgatgtgcttccgatgtgatgaatagcgataatctccggcccgaacacaagtttcagccgttctttttcttcatcgaaacattctgcccatttttcgttgtagagaatgatctcaacttttcttttcggatacaaatgaaagaccgacagcaatagaccctgcgctgctttgacggtttctgccttttggaatccggcctgtgtatagagtgacacagccggggtattgttctcggctgtgactacttcgattttctcagcgtcttcattatgatcaatgacaaattgcagaagcgctcgtccaattccttttctgaaaccgtcaggatgcacaacaagcctgcaaatggtgagataatgcatgtttttctcatatgaaatgacaccgatcagcttgccgtttttccgatatcccgcaaaccgttcatgggatgcttgaatatcctttaccttctcttgtaaagcgggaataccgtcaaaaccgataatctctgtttcctttatgtaggcggggatctgtacggctaaaatctcacgcgctatagtggcttccttatgctggagaaattcaatcattcgtgttctcctgaaacagccgctgtctgtcgacttttgcgacgcggactgcatacgactcgtaccaaacgcttcttcctttttcttttgctgcttgatgttcagtgtgatgcctccaatggttaattgcgtccatactgtcccaataggaaactgtgatgccccttccatccgcttcacgtacgctttccacgcctaaaaatccaggctgatccgccgcaagtgataccatccgctccgctgtttctccatatcctgtgtcattttcgcttttgacagaagaaaaaatgactgcatagtaaggaggctcaggtgtttttgataaaaaatccatcatatttccccctcatatgtttttgacaaatagtaccctgtcttggcccgggccatcatagtttgcaaacactgagatgccatttaccgttttggtgcccttttcaatatcaaaccccaattttgtgtgatatgcgattgataccttattcacaggtgaagtgacacacttcacccgggtgcagcccctttgttttactgtttcgataaatacatcatacaattgtttcccaatttgcatttttctgaaatccggatgcacaccggaaaaatgaatgtacgccgtttcaggatcggattgcgattgaaatccgattaaaaatcccgtcatgctgttatgttcggatgtaataaagcttgtgtcctgaaaatgctcaaaaaatagtctcggcaatttttctttcagctgtctgccgccccaccattcattcagtacagacgttaccatttcataatctgaagacgtgattgttcgaatatccattacgatttgatctccctccgtctggcaaaacgaatgtcagctctttttctcacaatataaaaattatattttgcctggctggaattgtaaatgccttctttcctgtatcatacgtttccagactgccgagggaacaatgtttgatcattttacgcctatttctcccccaaacaggaggagagactttacagcacaatatcaagcacttgatcaagtttcagcttataaagctgatcctcgtctccttttatccatactgctttttcaaactcttcataccggcagattttcccggtgcagcagacaatctcaccgtcctgaaagcagctgacagtgatatcctgagcaaactccatcgcggcgcaaagcgtttgattcatctcttccagcttatcggggtcaaggatcggcttttgcagcttctgtttaagtcgctttctctccagcaggctttgcttatgttccggcagaaacatcctgctcccttcccacagcaggttgcccctttttaaatggtcgttcatttataatgcccccctattttagccgcacgttcaaatgcctggcctgccgctgtcagtgacgccgccctgatgattgctgtatcgccgaatcgatttttaatgccatccatcacatagcctaggctcattttctttgcataatcctgaaataaattgagctgccatatgtcatcagatgagagctgagacagattgacaccgaggcggcggacgggtttcccgtcccaaaatgtaagaaacagccgtcgtacagcctcatatacatcctgcgtagaattagtcggctctgccagcttcacttgccggttgaagcccgtcggccaatcaaaatcagcaccccggcagctcactgacactgtctgccccatgaccccggcgtttcggcttcgcctgcacacctcttcactcagctcaagcaatacgaccttgatttctttgtcaaagtgttcgtagtctctcgggagagtcattccatgacctatcgccttttgcccgtccagagacgaagttgacacaggggaatagtcgattccgtttgccgtcatccacagcacgtggccgttaatgccccatttcttttttaaaagatcgagcggaaaagccgcgagcccgccgatcgtgctgatgcccattcgatttaaatgatgcttcatgcggctcccgacgccaaacatgctgcccaccgggagcggccacatttcggttttcatattttctttcgttaaggtaaaaataccgttcttattctttttggcaaaattgtcacacgcaattttggccagcgctttgttagggccgattccgacccgtgcataaacgccgatctcccgcatgattctgccctgaatgcttttcgcgatctccatcggcgtcccaaacagcttctggctgcctgtaatgtccatgaactgttcatcgatggaatacggctccacaaggtctgtatactcctcgagaatggccgtaatttgcagtgatacatcaatataccgctgcatacgcggccggagcacaacagcctcaggacacttttcctgcgcctcccacagccgtgaagcattcaccacacccttttgtttcgccagcgggcaggcagccaatacgactccgccccttttttcagggtcacccgaaacaatgacgggcctatttttcaaatgtggattttccgctttctctacagatgcataaaacgattgcatgtcaacgagaaaaatcactttttctttcatcatacacacctctaaaaagaacttatgttcgcttttcattatatgcgaaagtatgttcgttttatactggtaaatgattcttgtctgacagaaaatatgatccaagggtttgagagaagaaaaacatttagtagaataaaagcgaagcataaggataggagagtcatgatggagaaatttgtcgaaaaaatgctgggacaggcattgcggcaatacggcagaaacgttgctatagatccgttaagcccgtatgaaaaacaaagcctgaaagcggctctacaagagagacggaatgaagaaccagatgaggatttgcatgcgcatatagaagatatcatttatgactatgtcacaaaccaaggcctgttctcttaaacgcatgactgtcagttctttcagccgctgatgcggcttccctttgaaaacaccgcctgaaacaaataaacagtctcaggcttacagaaaaaaagcaggattttctcacgctccatagattcatatggcctggcgtaaaattcccctcaatgctcgcgcaaaacggaataagctgtccatgatcacgcgtatacactttttcgaagagatgtgctctcttgttctgtcatgcggtccatgccggttttcagcgtacatcttgatctcatagccggtttcactgccgatatgatccacgttctggcggcttaaactaacacaccctcactgaccaatcgctttgcttttcatcggacatcccgtcattttccttctttcaagatgtaaactccgtcagccacacgcatcctcaacgcatagtatattgccatccatacaatcaggcatactacatgtcaataacgaaatattttgaacgatctattggagaaggaaattttttcatatatgatagagaaagatcatacatacaggagagaatataattcatgaagaaatggaaagatatccacccgatcagctggacaattataatcggaaccattttcggcagaatggcaacatcgatgagcattccttttttagcgatttatttgacagccgtccaaggcgcatcagcttcctatgcagggctggtcatcgccgcgagctcatcagtcggcatcctcgcaagcttttacggcggatatatctcagataaattcggcagaaaaaacatgatgcttgtatcgattttcggatggatgctggtatttgcaggctttgcggcagcatctaatctctgggtgttttttgtagtaaacgcattaaacggtctttgcaaatcactgtttgagcccgcttcaaaggccttgttgtctgatatgacagaagaaaaaacgagactgctagtttttaatttacgctatgcggctattaatatcggcgttgtcttcggacctgtgcttggcctatatttcggctcatcgcaatcgactacgccctttttggtgcctgcagtcatttacggactatacggaattgtgcttgccctccaatttaaaaaacatccatccttatcagcaccagcccagtcccgaaatatgagcgtgcgggaagcgtttatggtcacgcaaaaggattatctttttaccattgctttggtcggcattacgctatgcaccttcggctactcacaattcagttccacattccctcagtatatggcgcagaaccccttgatcggcaatggaacgaagctgtatgggctgatgctgacattaaacgcaatcgttgtgttggcgacgcaatttcccattgtccattttgcaaaacggttttcgccgctttgttctctgatgctcggtaatgtgatggttagcatcagcatggccattttcaccgtatcacacggtgttccatcaattgtgatgattgtcatcacatttacaatcggcgaagtgcttttattctctatgatggatttgtatgtagaccagattgcaaaaccaggattaaaaggcacttatttcggggcaatcggtttttcacagctcggaaacgtcatcggcccttgggtcggggggatatgtatagacctgtttggcgctggccggccgatttatattttttctgtcctgagcggcattaccctgctcggcctgccatttttagcgttcgcctatcggcaaatgaaaatggagaccacaaaacaccgttcccgtctggaaaagccgctttaaataaaaaacggaagagaatgaatctctcccgcaaacatgaggtgaagaacatgaatataggtgatgtgatgtttcagctgtttgtatttattatatttgccgctgtcgtctttgcggctgttacaggcttcaagtatgcgaaaaaccgaaaagcgcagctggatcgcattgagaaaaagctgaacagcctgtccgaagatcacgattaacagcttggggcaacgagctctaccttaatccggtctggatcctcacaaaagactgcataatgcccgtctcctccggcaaaaggatgcctgtctcggtacaacacacgatagccttttgccgtcaatttttcagtcatctgatcgacttgaagcttggattcagcatgaaatgcgagatggttcagaccgactcggcatctatggtattccggctctagaaatggctctttcgcctgcacaatcactaggtaaaaacgatctttcttccagctgatgcctgagctccatttttgatactctttataaccaagttcttttaagaaccagccccaaaaccgcctagacgcctccaaatcagagacatacagttcaatatgatgcacatttcataccctccttaccaacacttcctcgaccttatgcccgtctcccttacgcaaaatgagatctgacctgaatttagttggcaaaatattttcatataaattcggccggttgacactctcccaaatcgaggctgccatctcgtcagcctcctgatcggacaagtctttaaatttatgaaaatatgaatcaggattttgaaaagctgtttcccgaagcaggcgaaaacgctctaaataccaagtgaaaatccggctttcctccgcatccacataaatcgaaaaatcaaagaaatcggaaacaaaaatacgcgggttttcccggtcatcctccaaggtgggcgactgaagaacattaatgccttcaataatcacaatatccgcctgttctacaacctcgaacacaccttcctcgcggtcataggttagatgggaatacaccggggcctttacgctgtcctttcctgattttaagtcattcaaaaattcgagcagcgcctttacatcatagctttcaggaaatccttttcttgacatcatatttttctttttcagctcggcagtaggaaataaaaaaccatctgtcgtgataaggctcacttttggacggtcaggcaaacgcgaaagcagcttctgcaagatccgcgccgtcgtgctttttccgactgcgacactgccggcaatgccgataataaacggaattttggctgaatgtgggtgcttcaaaaaaacattgacatgcttattgcgttcagccgcagacttgacatgtaaatgaagcaagcgaacaagcggaatatagatcgtctccacttcttcaacagatagataatcattcaatccttccacagcttttgcctcttcttcagatacagcaatcgacaaatgccccccaaaaccagaccaagactcccgattgtgctgtgtatataaagtatgtaggttaagttctttatttttcactgtttacacctgactctctgtaggttaaaacccttacaaagattgtaacggaaaaccttttcactgtctgcttatttttcatttcgtttttttagcaaatcagcaccgattcggttatacgcagccatttcatcttttggaaccatgcttcctcccgttccccagacgacatgtacggcatgttccatcttatatttctgagcatagcgccttccctcttctgtcgaaaaaagctgaaccggcccgaacatgccagcaagagcagagggctctaaatatttatcttcagatacagccagcatatgaagcaaagtataaagcgtattgtcctctaccgtataacagccgctcagaagcggttcaatcagcttgccgacaaatcctgacggcctccctacggcaagtccgtcagcagccgtctgattatccaggccgatatcctggacggagatcttctcgtgaagtcctgaataaagccctaacagcatacaaggtgaatgagttggttctgcgaaaaacacatgaacatcatctccgtataaaagcttcagcccaaatgctacaccgcccggtcctccgccgactccgcacggcagatacacaaacaagggcgtctcaagacttggctttatattcatacagtcaagctgtgtttttaatcggcttgcagcaacagcatatcctaagaacagctgacgagaatgttcatcatcaataaaataacagaatggatcttgttccgcctgccgtctcccttcgttcaccgcttcactgtaatctgtttcgtactccataacagtgactcccttttggcggaggagatcctttttccactgcttagcatcggcggacatatgcactgtcacgcgaaacccgagtgccgcgccgatgatgccgatgcttaaacctagatttcctgtcgaaccgacagcaatcgaatagcgggagaaaaacccggtaaaccgctcttcctgtaagatgcggtaatcatcggtttcctgaagcattccttcttgaagcgcgagattttcagcatactttaacacttcataaatcccgcccctcgctttaatcgatcctgaaatcggaagctcatggtcgcactttaaaagccatcttccgggaaatggctgctgatatgccgcttccagctttcccttcatatgctgcacctcaaaaagcggagactcgatgattcctttagcgcctttcgtctcaggaaacacctcggcaatgtaaggtgcaaaccgctgcattcttttttccgcttccgctatctcggttgcccactcatctgcacggggtaatggcccctctttcttgcctgaatttgcccagaatacaggctctgcatcaatcagtttctgaataaacggatctttaagcagagcatgaaggacttctgaatgaactgacattcaacaatctctcccttccactatcaaaaactgccccgtgagaaacaagccactccaccacaggcagttctatcattattttttcatgagcgcgcgtcctgccagcttttctacaagagctggaaacagctgatacagcttagtgccggcattcattaaacgcggaagattgatctcccgctttttcgtaaaaattgcagctgtaatttgagctgccacgtcatcaggatcaagcatccagcggccgacatttttggcgtagtccccgcctttatcagcaatggaaaaaaagtccgtctgaatcgggcccgggttgactgttgtcacataaatgccggttcccgaaagctccatccgcaaagcgtttgagtaacctaacacggcatgtttggtcgcggaatacaggctagacttcggtgtggcgattttccccgcttgagaggcgatattgatgatatgtccctttttttgctcaagcatttgcggaagcaccgcttttgtacaggcgatcaggccgaagacattcacatcaaacatcgctttcatgtcatccaatgtagagtctaaaaccgtttcaaatataccgaagcctgcattgttaatcagtacatcaatcgagccgatctgatcgcggacccgggcgatatcctctaggcggccgacatccagaggaaaaatctcacactgtccgctccattcctcggttattttccttttgatttctatcaaacgatcctcgcgtctagccgacagcaggacatgggctccttcagccgcgcataagtatgcgattctttctccaagccctcctgaagcgccggttatccaaatcctttttcccgctatatgtttcacccatttcacctcttcattgttttaaagtatacggtatttccttcccaatatgacgtgatggcttcttcagcctccaacacatcaaggtgacctgccgtttctgacatcgttaaaaacaattccttttcatatacagcaggaaaaagctgctgacagacctgaaaagcggtcatcggcttttcatccagcatgcgacgcacatcctccgtcctgttcctctgcttgtcaaaacgcttctcaatcagcgcttgtacactggtgataggctcgccgtgaccaggaaatacgattgttggatcaagttgagacagccttcgcaatgaccgctgataatccactaaaggctttgacctgacgtctcccgctttcggcgcttccaaaatcggattagacgagctgtttgccagcagtagatcgccgccaagcatccttccgcttttttcatggaacagaacaatatgcgattcagcatgtccaggcatctccaacacagaccagccctcaagcccatctatgcccataccttctctgattgattttgtcagagatctcgtacaggaaaatgcgtacgctgatcgaatcagcttttccgccttccccgtatcaaatggaacgcctaattcaggcagcagcttttgaaaaaaacgtttttgccaatccataaaggcttgattttggctgatataaggttcgttgaatgtatgcccaatcacttcgatttcatctgaaaagacatcaagcaagcctgcatgatcagcatgatggtgagtcagtacaacctgctcgatatctgacaatttcacatttacagcggcaagctgctcttgtaaggctctggcagcctcttttgtattcggcccggcatcgataagtgtcagcgcatcaccttttacgaggtaaacgataacatcgccgacagcaaacggtgtcgggacgcggatcgcaattacatcttcagttgtcatcctttcgctccttgtcttcattcattattcatattttagctttttctcggtcttgtgtcattattgcagaatgagaacaaacctttttgaaaaagctattgacattagcttgtccgccattgcataatgaacaacaaactaaaacgagaaccattggaacgctatgacgaggaatagtatacaaggcaatggcctaagagagcgatacccccggctgaaaggtgttgcggcccgcttgtttgtagaacctgccctcaagtcgcggttaggaaaacctaaacgtttcccgcgttacggggatttgagctgagcacaatttgtgctaatgagggtggtaccgcgaaccttttcgtcctttacgtgatgaaaaggttttttgttgttctaatagaaggaggatatcaatgaaaaagataggatttgtcggcgccgggtcaatggcagaagcaatgatcaacggcattttgcaaagcggcatcacaaaaccagaacatatctatattacaaatcgctcaaatgacgagcgtctgattgaattaaaggaaacgtacagcgtgcgtccatgcagagataaaaatgagtttttcactcacaccgatatcattatcctcgctttcaaaccgaaagacgcggcggaaagcatcgacagcatccggccgtatatcaaggaccagcttgtcatttcagtacttgcaggccttaccatcgaaaccattcagcattattttggcagaaagctcgcggtcattcgcgtcatgcctaatacatcagcggcaatcagaaaatcagcaaccggattttccgtaagcacggaagcaagcaagaatgatattattgccgcaaaagctctattggaaacaatcggtgatgcaacactggttgaggagcggcatcttgacgctgtcactgcaatcgcaggcagcggcccggcctatgtgtatcgttatattgaggcgatggaaaaagcagcacaaaaagtaggattagataaagaaacggcaaaagcactcattttgcagacaatggcaggggcaacagatatgctcctccaaagcggcaaacagccggaaaagctgcgtaaagaaatcaccagtcctgggggcactacagaggcaggtcttcgcgctttacaggactcccgctttgaagaagcaattattcactgtattgaagaaacagctaaacggagcgcagaaatcaaagaacagtttgccggtgccgccttagagagacattcttagatgtaaggacaaaaacagaaggcacagtgccttctgttttttatttttcccgcagcagctggccggcagattctgattgctttaatagcgcggagatcgtaaatgaaagcaaatcgggaagcacttcaaaggaataaggcatatacaatctttccgtccatttatgcgggtctttaccagccggaccgacatttaaaactgggacatataaagcctgatttttaccgcttggcaatgaataccctctgttaaagagcggcatattgcttgtgtatgcatcaacctcctgtttttccagctgaagataactcaagtccgaaagtccggggaagtactgaacctcccgtaatgcaatgccgtatcgctcagccgcataatgctttatctgatctgctgtatttctgatcaattgatcatcctttgaagaaacagctggataaagcggcggactataaaacagaacgatgagcggcgcatcctccttacaaagcgaagcaagctcagaaacaattttcgtcgaaaaatccctgtctccaagctcccccctgttagcaaaggcataatttagagcccgctctgtttccgagatccccgcacgcttttttgcacgcgagaccagctcatcaaatgtcaaaacagtgacgtcccgctcaatcggctgaaatggctcaaattgttgaaaatcctgtgttttcttccgaacgttcgacatgatttcctccgccgcctgttctgctgttttaagcagcatctgatgcagctcactagctgagcgtttcattgacagcacattaaataatgtgacggctgtatgcggtgtctggactgaatatgcctctttcaagtccttttgcattaagtttaccggcggcggagtgacctcgccatcaaccttttcgcaataatcagcattcagttcaagcaaacggttaatctcagataccattaaatttgcgtttagacctgaaaacggctctccaacatgtgtctcaatccccttgcagaaaaaacccgcaagcaccttgccaatgcttcctgtataaaaatattgctgctgatcgccgggaaatttttcaaacatcggttcggcattcaggcaagcggttaatgtgatatcatgctttttctccatctccttcaatgcaggaaccgcttcaatcatgcctcttgaattcacttcctcgtccggaaccgttatcaacagcagattgccctcaaaatgcccgttcattgccctctccagcatcgacagttgaatacaaagccccgctttcatatccatcgtccctcttccgaacagccagtctccgctttcggcatctcttctcacacgttccgggagcagctcttttttctctaaaaaggagctcaaaagctcagcaggcttgcaagccatatgtttaaattcgccgtaatcttctatgtcaacgacatcaaaatgactcagcagaagcactgtctttttgacattcttctttttgactagagccgtaagaaaagatctgccatcgtccatcggatgaagtgttacatcatcagggtgcttttgaaaatagggcttgtccttcaaaataaaataaagatactctgcaagcgctacctcgccctttgaaccggtgatgctttcgtattgcacaagagaagttaaaagtgccagcaattcgtccttcgtctgccaattcattgattccgcccctcctatgaataaaaatgcttctatactgaaaaataaactgatttctcgtctattatacagaaatgtttgacaaaagcggttcatttgagcagtttatatgacgggaaagaaatgacttgatataatcaatctctaaaaaccttacgggaggcgaaagaaatggccagaaaattatttacacctattacaattaaagatatgacgttaaaaaaccgcattgtcatgtcgccaatgtgcatgtattcttctcatgaaaaggacggaaaattaacaccgttccacatggcacattacatatcgcgcgcaatcggccaggtcggactgattattgtagaggcgtcagcggttaaccctcaaggacgaatcactgaccaagacttaggcatttggagcgacgagcatattgaaggctttgcaaaactgactgagcaggtcaaagaacaaggttcaaaaatcggcattcagcttgcccatgccggacgtaaagctgagcttgaaggagatatcttcgctccatcggcgattgcgtttgacgaacaatcagcaacacctgtagaaatgtcagcagaaaaagtaaaagaaacggtccaggagttcaagcaagcggctgcccgcgcaaaagaagccggctttgatgtgattgaaattcatgcggcgcacggatatttaattcatgaatttttgtctccgctttccaaccatcgaacagatgaatatggcggctcacctgaaaaccgctatcgtttcttgagagagatcattgatgaagtcaaacaagtatgggacggtcctttatttgtccgtgtatctgcttctgactacactgataaaggcttagacattgccgatcacatcggttttgcaaaatggatgaaggagcagggtgttgacttaattgactgcagctcaggcgcccttgttcacgcagacattaacgtattccctggctatcaggtcagcttcgctgagaaaatccgtgaacaggcggacatggctactggtgccgtcggcatgattacagacggttcaatggctgaagaaattctgcaaaacggacgtgccgacctcatctttatcggcagagagcttttgcgggatccattttttgcaagaactgctgcgaaacagctcaatacagagattccggcccctgttcaatacgaaagaggctggtaatgcccataagagatatcctgtagaggatatctctttttttatttttagagaaacgatcggctaaggttctccgtctccctagtagaaccaattagaggagatgactccaatgaaatcagcttggatggaaaagacatatacaattgacggatgtgcgtttcatacacagcaccggaaaggatcaagcggtgtaacgattgtctttgaggccggctatggtacttcttctgagacgtggaaaccattaatggcggacattgatgatgaatttggcattttcacatatgatcgggcaggcataggaaaaagcgggcaaagcagagctaaacgaacagctgatcaacaagtgaaagaattggagagtttgcttaaagcagctgatgtaaaacctccttatttggctgtttcacactcatacggagctgtcatcaccggtttatgggcctgcaaaaacaagcatgatattatcggcatggtccttcttgacccagctttaggcgattgcgccagctttacctttatacccgaagaaatgcacaaatcacatacgagaaagatgatgcttgagggcacacatgcagagttttcaaaaagtctgcaggagctcaaaaagcggcaagtccacttaggaaacatgcctcttcttgtgttgtcatcaggagaacggactgagaaattcgctgctgaacaggagtggcaaaacttgcacagcagcatattgtctctatctaaccaaagcggctggattcaagctaaaaacagctcccacaacatccatcatgatgaacctcatatcgttcacttggctatttatgacgtatggtgcgcagcgtgccagcaggccgctcctctttaccaggcagtcaattaacgtaaaaaaagaccgggccgtaagggattcccggtcttttatattattttgtttcacggtgaagggtatatttctttaaacgcggtgaatattttttcagctccaaacggtctggattggtgcgtttattttttgttgtgatgtaatttcggtctcccgtttcagtgcaaagctaaagtaacatttactctcataattaacatctccttataaaacgtaatgattacgttttattatacaacgtcatcacaaattgtcaaataagagctccgccttcagcctcgcgggacgtttacctctaagaaatcatatgccgccacgctattggggaaaacgtcaaccgcttctttttgaagctccaaagaagcatctccctgatatcttgcgctgatatgggttaaaatgagctgcttcgctcttgcttctttcgctgttacagccgcttgttccgttgtactgtgataataatcataagcaagtttacggtcttccttagcaaaggttgcttcatgaacaagcacatcacaatccctcgcaagctcttttagtttgtcacttactctcgtatcaccggagaacacaacagatcttccctttttaggaggctccagaaaatcattcccattgatgattcgtccgtcttcaagcgttaccgtttcgccttttttgattttctgatatacaggtccgggcgggatgttcatttcttttaatacgtcagccttcaaggaacccggtacgtctttttcctgcacacggtacccgaaggcttccactccatgaataacagataccgctgtgacaataaactgatcgtcctcaaacacgattccttcttcaatttcctggatcgcaagcggatatgtcaaatgggttttcgtgacggcaaggcttgtttcaataaacgccttgatccctttaggtccgtacactgtcagctcgtcctctccgccttgaaaggaacggctccccagaagccccggaagtccgtatacatgatcgccgtgcatgtgtgtaataaagattttctctattttacgaggtttaatcgttgtatgtaaaatttgatgctgtgtggcttccccgcagtcaaaaagccataccgaacgcctttcttcaagcaattttaatgccaccgacgttacatttctcgccttggcggggatgccggctcccgtccctaaaaaaagtaattccacgtttccttcctcctactagaaccagatacctacaagaatacaggatcaagcggaaaatgtgaatcttgcctctgaaaagaacaatcctttcgtgctagaaacattttttcagcattctgcttaaaaaagggcttaaatgtttgctttcgttgaattttagatttaaaatgaaggaaatatacggggtgtactaaaataaagcttcgaataaagtgaggtacttttagtgaaaacaaaccaacaaccaaaagcagtaattgtcatattcggtgcaactggagatttagcaaaacgaaaattgtatccgtctattcaccgtttatatcaaaacggacaaatcggagaagagtttgcagtggtaggagttggaagaagaccttggtctaatgaggatcttcgccaaactgttaaaacatccatttcctcatctgcagataagcatatagatgatttcacgtctcatttttactatcacccgtttgacgtgacaaaccctggttcttatcaagagctaaacgtattgcttaaccagctggaagatacatatcaaattcctaacaacagaatgttctacttggcaatggctcctgaattcttcggaacgattgcaaaaacattaaaatcagagggtgtaacagctacaaccggctggtcccgccttgtcatcgaaaaaccgttcggccatgatctgccaagcgcacaggcattgaataaagaaatccgcgaagcatttacggaagatcaaatttacagaatcgaccattatctaggcaaacaaatggttcagaacattgaagtgattcgatttgccaatgcgattttcgaaccgctttggacaaaccgctacatttcaaacattcaaatcacatctagcgaatcactaggcgttgaagaccgcgcaagatattacgaaaaatcaggcgcccttcgcgacatggtgcaaaaccatattatgcagatggttgcccttcttgcaatggagccgcctatcaaattgaacacagaagaaatccgcagcgagaaagtgaaggtgctgagagcactgcgtcctattgcaaaagacgaagtggatgaatactttgtgcgcggacaatatcatgctggtgaaattgacggtgtaccggttcctgcttatacagatgaagataatgtcgctcctgactccaatacagaaacctttgttgccggcaagctcttgatcgacaacttcagatgggctggtgttccattctacatcagaaccggaaaacgaatgaaagaaaagtccacaaaaattgtcgttcaatttaaggacattccgatgaacctgtactacggtaatgaaaacaacatgaatccgaacttgcttgtcattcatattcagcctgacgaaggcattacgctttacttaaatgctaaaaagcttggcggagcagcacacgcacagccaatcaaactcgattattgcagcaattgcaatgacgagttgaacacccctgaagcatatgaaaaactaattcacgactgtcttcttggcgatgcaacaaactttgcacactgggatgaagttgccctttcttggagctttgtcgactctatttctgaaacatgggcagcaaacaaaaccttatctcctaactacgaatcaggctcaatgggaccgaaagaatctgatgatcttttggtgaaagacggcttacactggtggaacatataataagaagaaaaaagccgaaaatgtttacaagcattttcggcttttttacgctgaacaaaggtataacaatctccttaataacaaaacccccaaagcttaagagcttcgggggtttctattgattacttcatccattcagtatggaagatgccttctttgtcagtacgctcataagtatgagcgccaaagtagtcgcgctgtgcttggattaagtttgcaggcagtacggctgtgcggtagctgtcatagtaggctaatgcgcttgagaatgatggcaccggcacaccttgggcaactgcaagtgaaatcacttggcgaagcgctccttgatagctttctacaatattcttgaaatagctgtcaagaagcaggttgtcaagctcaggctcgcgatcgtaagcttctttgatcttctgaaggaatgccgcgcgaatgatgcaaccaccgcggaagatcatagcgatttcaccatatttcagatcccagttgtattcttcagaagcagctttcatttgggcaaatccttgcgcgtatgaacagattttactcatgaacaacgcttttctgaccgcttcaatcagctcttctttattttctgtaacaggcttcacttctggtcctgaaagaagtccgctcgcttttacacgctcttccttcatagctgagataaagcgtgcgaatacagattcagtaataatcggaagcggaacgcctaagtcaagtgcgctttggcttgtccattttcctgttcctttttggcctgctttatcaagaatcacatcaacaagcggtttgcctgtttcttcgtctttttttgtgaagatgtcagccgtaatctcaatcaggtagctatcaagctcacctttattccattcagcgaaaacttcatgaagctcatcagcagaaaggcccagcacctgtttcagaatgaaatatgattcagagatcagctgcatatctccgtattcaattccgttgtgcaccatttttacgtaatggccggcgccgtccggaccgatatatgtcgtacaaggttctccgtcaacttttgcagaaatggcttcaagaatcggttttacaagctcatgtgcttctttttgtccgccaggcatgatagaaggtcctttaagcgctccttcttctccgccggaaacgcctgttccgataaaatgaatgccgctttcagcgagttctttgttacggcgctgtgtatctttatagtatgtattaccgccgtcaattaaaatatcatccttctctagatgaggaagaagagattgaattgtcgcatctgttgcagttcccgctttaaccattaataagattttgcgcggtgtttccaaggattggacaaattcttcaatgctgtaagtgccaacaacattttttccttttgcctcctgtaaaaactcctcagttttactgcttgatctgttgtaaacagaaacagaaaatccccggctttcgatatttaaagccagatttttacccatgaccgcaagtccgataacgccgatttgttgttttgacatattctaacgtcccttctgcaaacgtttaatcattttaaaatttaaattaaaataaaatgatatttataataaagaaattaccatacattcaccctttttttcaagcgattcagcttttcttttcatcttgaaaaaaatctttattaaagcttgttccctttgttttgctctcctctttttttaacgttgccccttttctgatcagtttggtaccgtactttttattcagcttttccatcatctgctgaatgggctcatccttcgcatcttcattaaagctgaacaaatcgagctgtttataggcctgctctttttctactaaatccgttccggtaatgccaagcagcctgacaggatttttattccaatgtttaaaaaagaggtgctccgcttctttcaaaatgtcatttttttgatcaatcgggtttctcagcgtagtgcttcttgtgatggttctccaatccgcatatctaatcataataaaaagcttcgaagccatgacttccttgcgctgtaaacggtcactcacagaagcggcaagctttctaaaaacgcctaacagctcttcttcatcactggaatcatgggaaagtgtcgatgagttgccgacgcttttaaattcgtaaatgcgctccgggtcaaccggcgcatggtgaatgccatttgctttatttttaaggcgcggaccgttgatgccaagcaggcgcttcagcgagtgttcatcagctgcagctagctctccgattgtatggatgccgagtcccttcagtttttccgctgtctttttgccgactccgtgcatctctccaacaggaagcggccacaggatatcgggcacttgcctctttcttaagatcgtaattccaagcggttttttcatatcagacgccatcttagcgagaaatttattcggtgcaatccctatgcttgacgggagcagcagctctttttgcagcctgctttggatttcttttgccgtctctagagcgcggctgctgtatggtgtatcggtcatgtccatatagccttcgtcgatggagacaggctccactaggtcagtatattcacgaagaatggtaaacatcgctcgtgaagagtttctatagcggtcaaagttcggcggaagaacgatgagctcaggacaatggcgcttcgcttgccaaaccggcatcgttgttttgacgccgcgcgctcttgcttcgtagctgcatgttaccacaatgccctttcgctcctttacgtttccggcaactgcgaccggctttccccggagagccggatcatatgccatttcaaccgacgcataaaagctattcatatcaatatggaaaataattcggctctttcccggcataaacaaatctccttttcggtcattagacaacagcttgtacatatagtaaaatgaagctattgaatggatgtgatgacaatgtttgtggaatcgataaatgacgttttattcttagtcgattttttcacaattattcttcctgctctaacggcaatcgggattgcattcctcttacgggagtgccgtgcgggcgagcaatggaaatcaaaacgaacagatgaacatcagacggtctttcacattaaccgaacagactttcttattattatatatcatcgcattacaacttggatacgtaaagtcttccgcatgaattcgcctgtgaacgatgaggaagacgccggttctcttcttttataaaccgcatttataaaaaggaggagaacaaaattgttaaaaacatatcaaaaacttttggctatgggtatctttttgatcgtattatgctcgggcaatgctgcatttgcagcgactaatcaggtgggaggcctcagcaacgtaggttttttccacgattatttaatcgaaccgttttccgctctgcttaagggtgttgccgggctgtttcacggagaatacggactctctattatcctcgtaaccattattgtgcgtatagttgtattgcctttgtttgtcaatcagttcaaaaaacagcgcatcttccaagagaaaatggccgttattaaacctcaggttgacagtatccaggttaagttgaaaaagacgaaggacccggaaaagcaaaaagagctgcaaatggaaatgatgaagctgtatcaggagcataatatcaacccgcttgcgatgggctgtcttccaatgctgattcagtctccgattatgattgggctttattacgcgattcgctcaacacctgaaattgcgtcacactcgtttctatggttcagtttagggcaatctgatattctcatgtcccttagtgcagggattatgtattttgtccaagcctatatcgctcaaaaactgagcgcgaaatattccgctgtcccgcaaaaccctgcagcgcagcaatccgcaaaattgatggtgttcatcttccctgtgatgatgacgattttctcgcttaatgtgccggcagcccttccgctgtactggtttacaagcggactgtttttgacagtgcaaaacatcgtccttcagatgacgcatcataaaagtaaaaaaacagccgctcttactgagtcggtgaaataaaaaagcaaccccgtgcaaaaagccggggttgttttttgttacttgcaaagtaccgcgccaaacagtcttgtttatcatggctgaagcagaaatggccatcctaaaaaatagccgtatcgtttaaaaagaaggaaatcgggaatacctttactcacctccaaccgaaaggagcctatacgttgacggaacgctttcagcaaaaaaatatttctgtacctgatggaatctggatcatgagacaaacctggaatgatgtcttatttgctcactggcctgttgatgtttctatccttcgcgctttggtaccgtccgttttagaattagatacatataacgggcaagcttggatcagcatgcttccctttatgctcacgaacctgagggcgcgttatctccctgtcattcccggtgcgcgtgcatttcctgagcttaacctccgcacctatgtcacgtataaaggcaagcccggcatttatttttttagcttagatgccgatcatcgtctggcggtccttggcgctcgcacattctttcatctgccttatttttacgcggatatgaagtccgaaaaaaacggtgatgccattgactatgtcagcaagcggaaaaatgacaaagaagcagcattccacgccgcataccggccaatttcagcgccttttacagcagaaaaggattcgctcgattactggctgacagaacgatacaggctctacaccacttatcgcaataagctctattacgaagacatccatcatcatccgtggctgctgcaaaacgccgaagcagaaatttcagtcaatacggtgactgatgctcacggtattacattgccggagtcagaccccttgcttcattatgctaaaaaacaggatgtgttattttggccgcttaggaaatggagctaaaaaaacccgatgcgggaaatcgcactcgggttttctttttttattttgccgcctcttcaataatggcaacaaccatttctgccgttttaacgagctcttcgatcggcattttttcattttttgtatggatttgctcataaccgacagcaagattgaccgtcgggatgccatgaccagcgattacgttcgcgtcgcttccgccgccgctcgtttgcagctcgcttggacgtccgattttagcagccgcttttttcgcgatttcaacaacttggtcgccgtcttgatatttaaagcccggatacataacctcaatttcgacttctgcgcgtccgcccatatcagcagctgcctcttcaaaagcagctttcattttttgaacctgagcttccattttctcaggaactaaagagcgcgcttcagcaagaatatgaacttcgtcgcacacaatgtttgtttgtgtgccgccttcaaaccggccgatattagctgttgtttcttcatcgatacggcccaatggcatttttgagatggctttgctagcgattgtaatcgctgaaatgcctttttcaggttcaaccccggcgtgagcggttttcccgaaaattgccgctcttaccttcgcctgtgtcggcgcggccacaatgatatttccgacttttccgtctgaatcaagagcatagccgtaggatgcagtgatcatagaacggtcaagcgccttcgctccgatcagacccgattcttcccctactgtgatgatgaattcaatcgtgccgtgttcaatattttcttctttcagcaccttaatcgcctcaaacattgcagccaatcccgctttatcatcagcacctaaaatcgtcgtgccgtcagttttgacgtaaccgttctctacaactggttttacgccgtttccgggtacaactgtgtccatatgagatgtaaaatagatcgtatctgtttgttttgtcccttttagcgtgcaaatcaggttaccggctccgtggcccgtgatatccattgtatcgtcttctttaacgtccacacctaaatcagaaaattttcgtttcagcactttgcagatttcagcttcgtgctttgtttctgagtcaatttggacaagctctaaaaattcttccagcaggcgtttttcattcaccatttgtaagtccctccatattaaagcggtatgttaccgtgcttttttttcggtctctcttctgtcttatgtgtaagcatatgaaaagcttgaatcagtcttccccttgattcttccggcaaaatgatgtcatcgaccattccacaagcggccgctttgtatgggccggcgttttgctttttgtattcagcagttttttcgcgtttcgtcttttgcgggtcagctgaagctttgatttccttttcatacaaaatcgatgccgcaccttctggacccatcactgcgatttcagcattcggccatgcaaacacaaggtccgctccgatcgctttgctgttcatggccacataggcgccgccgtacgcttttctaatgatgagtgtgacttttgggacagtcgcttcagcataagcaaacaataattttgctccatgcctgatgattccgttgtgctcttgctgaatacccggcagaaaccccgggacatcttcgacagtcaacagcgggatatcaaatgcgtcacaaaaacggatgaaccttgctgctttatcagcagcgtcaatcgtcaggcttcccgccagatgcttcggctggctcgccacgatgccgattgctttttcacccagccttgcaaacccaatgacaatgttcttcgcaaaaaatggctgaatctcaaaaaaagactgcgggtcagccagctccctaatcaccttccgaacatcataaggctttgtcgtatcagcagggacaagacggtttaataacggtctggacgcctctttctctggcttcggctctgttgtccggccattcagcggcaaataagacagtagttttctcacccctgtcagaacctccttctccgtatgcccggaaaagtgggcgtttccgctgacggcattatgtatccccgctccgcctaagctctccgcatcaacctgttcccctgtcactttttcaatcaccttcgggccggtaataaacatccggccagtctgttcagccataaatataaaatctgtgagtgccggagaatatacagcgcctccagcgcacggccctaaaataaccgatatttgcggaatgactccggaatataagacgtttcggtaaaatatgtgaccgtatccatctaatgataacacaccctcttgaattctcgcaccacctgagtcattcagcccgataatcggcgccttattttttgctgccagatccatcaaagcgcagattttcctggcatgggtttcgccaagcgcccctccgtacactgtgaagtcttgcgcaaatacataaactgagcgaccgtcaattgtgccgtaccctgtcacgaccccatcccctaacatgcgctgttctcttgttaacacttgactttccatgaaggggtgtaattcgataaagctgtcctgatctagaagaaatatgatcctttcccgagcagtgagcttgcccttttgccgctgctgagccagcttttcccgtcctccgccttcttctgcctgcttgcgtttcgtgtaaaaatgatccatgtgctcattcatgctcattgtgttggtctcctttcggttcacaaagctctacaagaacaccgtttgtttcccgaggggaaataaacgcgatctttttcccgttcgctccctgtcttggaaacctgtcaatcaattgaacatgctgatcagacaatgcttgaagctgttcagataggcagttgcacaaaaacgcaatatgatgcagtccctgccctttcttctccaaaaataaatggacggggctgtcagctgtcaacggctctatcagctcaagtttgacgctaccagcttgaaaaaaagcaacattcaccttttgctcttcaaccgtttcttgatgaagaaatgcaagccccaatacattttcataaaagcttcttgcatcttttatcgaaaaaacggctatcccgatatggtcaagcctgttcattttcatccctgctttcgctaatagatatcgcttgtccgcccattcaaaacacgctaaaatatagacagattgtttaaggagtgaaaatcatgtctcaaaaactgatgaaaagcgttttgatcgtgattttgggagtttttattctttcaactgtactctcaggaatcgtcatgtttctataacgataaaaaagcaggcgccttattcaatgggaatatcctgcttttttatcagagctttatgctcgatggcaatctcctcaaaagagcggttgtcgtccgtgatcagcactctcgttcctactggtatcgtttgaaacaaatgaacaacctcatcgttatgcatacgtatacagccgttagacacaaattttcctactgattcctctcggtttgtcccatgaattccataaatccgcccgtccgttcctttcgcgtcaaatccgatccatcttgccccaagcgggttatcaggagatcccccttcaatatttttctttctgtagtaaggattttccgcttttaccgttaccgaaaactctccttcaggcgtcaaatcatctgtttttccagtcgccacactatacacgccttctactttgttgtcgaggataacagcaagttcatttgttcgcttgttgacaataacatacggatcacccggcagcggattttcgccgagcggccaaatcggtgaaatcatcatgaaaatcgaacataagaaaaaacgcataagctcctcctttttcattaggttgaccaatgaaggaagagctcatgcgaatcatccgagtgatttttgcgcttttattcctttaaaataacttttaatcactaaatattgttccatttcgccgagaagatggaagagagcggccctcgcttcaaattcctctctagtcgcaggaagcggcatctcctcaaattcttttctcatgtcagcaagtcttttcagaaatttgtatgctgtattcccagggtgtatcgcctcccgcaaatcatgaataaattcagcgatcatttttccctgatctaccgtgatggagatcgatgtcactttagggagaaggcgttcgataatttcaaattgcttttctctcattttaaaataatgataatgcagattttcataacgcaaaatgtggttttgcacatctcgatatgccaggtttttagcctccgtaatgagctggtgcgtttccggaatttcttttcctgaccaatcttgctcaccagttaacaaataccgttcgatttctgcaaaaatgacagcaaagttatcctctatctttttgcggtaggcaatcagtttccggtcaagactaggcatatacaagttcatcaatagagcgacgccgatgccaaccgtaatcagctgaacttcattccagatgaaagtaggcgtaatgccgccggacatgtataaatgaaggataataacagaactggtgacgataccctcgttaatttttaacagaaccgttatcggaatgaatatcaaaagaagcgctccgatcacaaacgggtggtagccaataagctcgaaaaagagataagaaaaagcaattgccagacagcatgccgaaaagcgggcccatgaggcctgaagcgaccgtttttgtgtgatttgtatgcacaaaatggtgatgattcctgctgatgcgaagttttgcaaatgcaataactggcttatataaatagccaaagctgttccaagcgcggtctttattgtgcggtaaccaattttaaacatgtcggactccatttctatttgtttcttcaataaaaaagaagaggcggccagccttcttcttttttatattctataatattttctctaaaaagtcctgcgctcttttggattttggcgacataaaaaattccttcggattgccgtcttcgacaatcattccttggtccataaacagcacacggtctgccacttcttttgcgaagcccatttcatgtgtgacaatcaccatggtcatgccggtttcgaccagctctttcatcacctgtagcacttctttgaccatctctggatcaagggcggaggtcggctcgtcaaacagcatgatgtccggattcatcgcaagagccctggcaatcgcgacacgctgtttttgtccgccagacaaacggtttggatagtcatttcgcttttcaaacaaaccgactttgcggagcaggtcctcagctttctcctgtgcagcctgttttgattctttttttacattgacaggcgcgtacatgatgttttcgagaaccgttttgtgcggaaagagatgaaaatgctgaaaaaccatcccgatgttttcccggacctttaatgtgttggttttcggcttcgtaatctctgtgtcttttattgtaatggttccgccgttaggcttttccaacaggtttaaacagcgtaagaacgttgatttgcctgagcctgaaggaccgatcacggcaacaacctcaccctcagcgattgttgttgaaatgttttttaatacttcgtgtttcccaaatgattttgacagcttttcaaccttaatcattggatttcagcttcctttctacagccttgccgataaacgttaaaatcaggacaagcacataataaatcaatcccgcgataatgagcggctcaaggtaattgtaagtggcggcgccagcttgatatgcgcgtctcatgacatcaccaagcccgatgacggtgacgatcgccgattcttttgttaacgtaattaattcattcacaattgcaggtgatatatttttgaaggcctgcggcagcagcagatccttcatcatttttccatacgggacaccgagtgcaacagcagcttctttttgccctttatcaatggcattgattccggctctgataatttccgatacataagcggcggaattcaaagacaatgcgacaaccgcagcccaaaactggtcaatttgaaatccgagcagctgaggaaggccaaaatagacaatcataagctgcagcactaaaggcgtgcctcggaacactgatgtataaaaatcagcgatccagataaacgggcggaatgtgctgatcttgcataagcttagcacaataccgagtataagtccgataatagcagatacaacaacaatttttaatgtaattgccaagccttctaatataaaaggaatttgggggatcgttgctgaaaaatccaaattcatagcctttgtctccttttcttacaggaaaaaagtttcctattcaataaaaaggctcaacgaaaaagttgagccgcttttttttacttctcgccagtgaaccattttttcttcaatttctcaagctctccgttatcttccatttccttgagcgctttattgaatttgtctgtcagttcactgtcctttctgaaagcaattgctgaaccggcttcttccgctttcgcatcaggaatcacaaagccttgcaggtcatcatttgatttgaaatacccttctgcaacaatgtcttcaataatcgcggcatcgaagcggtcagatttgatttcctgcaccaaatcagaaattctgttgcggtcttctgttttaaaaccatattccggagaaagctctttccccttctcttcctgaatagagccaagctgaacgccaactgtttttcctttcaggtctttcaaagattgaatgccgctgtcttttttgctgacaatcatatggttcgctgtgtaatacacatcggaaaaatcaacttgttttttacgctcaggcgttggtgtcattcctgacagaacgagatccacctgttttgatttaagcgctgtaattaagctgttgaagtccatatcctgcacttcaatttcatagcctgccttctttgccagagcttttgccagctctacatcaaagccgacaatattatctccttctttatattcaaacggtttgtaatccgccgaagtacccataattaattttttctttccgctttctgaacctgaattgcttgagccgcacgcagttaatgcaaaggtgatgcaagcagccacaagtaataagagccattttttcatgatccatttcccccgtattcattacttttggtgtatttgaatatttattcgttaatttgtattttaaacagtttctcatttttatgcaatactatttttaaaaattatctttaggcttatctttccagtgatctcttctgatattactagataaaaattaaatcgctgtacaatccgattgaataatcccttaatatttattcatatatccttggaaatttatgcacaaaaaaacccgggctgctttgagcatccgggttgttcgtcttatacttcttcacaatattcttcaaaggcttcctgcagctttgccactacagccatcggctcatggccttcaatttcatgacgctctaccattttcatgatctttccgtctttcaaaatcgcaaaggacggagaagatggtggataaccttcaaaatagtcacgcgcacgcgctgtcgcttctttatcctgtccggcaaaaacggtgacgagctgatcaggtcttttatcatagtgaacggaatggtaggctgccggtcttgcaattcctccggcgcatccgcaaacagagtttaccatgacgagcgtcgttccttttttcgtaagtgcctcatccacctcttcggctgttttaagctcggtgtatccggcagctgttatttcttgtctcgcttggcggacaatatcattcataaataaattaaagtccatgttcaatgaagacctctcctttttcatcatctgttcttatgatagcaaggaaacgtccatatcggcaaatgactttgcttcgccgtgcactttttttgctcttcgtttactgcttacagaaaaaggggattatataaccagaagtaaaataaaggagcagttgtatatgagccaccggaaagcgttactgattcataacggaaatgccggcaacaaaaatatagaaaaagcacttggtgctgtggtgccggttttatctcaccatttagatgaggtgattattaaacagacaaagaaaaaggatgatgcgtatcatttttgccgatccattgatgattctgtcgacaccgtcttcattctcggcggcgacggcacgatccatcaatgcataaatgctatcagcgctctagaaagaaaacccgctgtcggaattttgcccggcggcacgtgcaacgacttttcaagagtgcttggcatccctcaaaatcttgcaaaggccgcggaagcacttatggcgggaaaaaaaaccagcgtagacgtatgtcagatgaatgaccgttattttttgaatttctgggggatcggcttaattgcagaaacgtcgaatcaaatcaacgaaacggaaaaagcattattgggaaaaatcagctattttacaagtgccttgcgaaccgtctcatctgctgcatcgtttccgatgacattaaaaattgatggagaagaaattaaagaagaagccgttatgctgcttgtgatgaatggccaatacattggaacgaatcgaattcctctgcccgatgccagtattgaagacggcttacttgatgttctcatatgccgcaataccaacctcaccgcgctgcgggagctgatgagcatggaacaaggctcaattgatcgttttactggagagttgtcctatgtccaggcttcccgtatcgagattgaaacagacactgccaaaaaggcggatatggatggagaagtttatacacatacacccgcagtcattcaggtcctgccacagcatatcgacatgcttgttcccgcaaatgaataactgtcataaggctttagaaagattttgcaaatccgttgactctcccctaggaggaggtcttacagtataagggatacacacttgaaaaaggggaagtcatatggagaagaaaaatattaccttaactatattattaaccaatttatttattgcttttttggggatcgggcttgtgattccagtaacgccgaccattatgaatgaattgcatttatcggggaccgcggtcggctatatggttgcctgcttcgctattacacagctcattgtctcaccaatagccggacgatgggttgatcgcttcgggcgcaagatcatgatcgtaatcggcctgttgttctttagtgtgtcggagtttttgttcggcattggaaaaacagttgagatgttatttatctcccgtatgctgggcggtatcagcgcagccttcattatgcccggggtcacggcttttattgcagatatcacgaccattaaaacacggccaaaagcgctcggttatatgtcagccgctatttcaacaggatttattatcggccccggcatcgggggatttttagcagaagtccattcccggctgccttttttctttgcggcagcttttgcactgttagcagccattttatcaatcctcacgctgcgcgagccggaacgaaaccctgaaaatcaggaaataaaaggacagaagacaggctttaaacgaatttttgcccccatgtatttcatagcttttctcattatcttaatttcgtcttttggtttagcatcatttgaatctttatttgcattattcgtggatcataaattcggatttacggccagcgacattgccattatgattacaggaggagcgattgttggcgccattacgcaagtcgtcttattcgaccgcttcacaagatggtttggcgaaattcatttaattcggtacagcttaattctctcgacgagtctggtattcttgctgacaacggtacattcatatgttgcgattctgctggtgacagtcaccgtatttgtcggatttgatctcatgcggcctgcggtaacgacttacctgtcaaagattgcgggaaatgaacaggggtttgccggcggtatgaattcaatgtttacaagtatcggcaatgtattcgggcctattatcggcggaatgctgttcgatatagatgtaaactatcctttctactttgcaacggtcaccttagccatagggattgcactgaccattgcttggaaagcgcctgcacatcttaaagccagcacgtgataagaagcgcattctttgtgtactgcaaagaatgcgcttcttctttatactgatgatagaaggagtgatggcatgaaggaatcgtattactcaattggggaagtatcaaaactggcaaacgtgtcgataaaagcgctccgttattacgataaaattgatttatttaaaccagcctacgtcgacccggataccagctaccgctattatacagattctcagctcattcatctggatttgatcaaatcattgaaatatatcggcacacctttagaagagatgaaaaaagcacaggacttagagatggaagaactgtttgctttttatacagagcaggagaggcaaatcagggagaaattagactttttatcagccctggagcaaaccatttcattggtgaaaaagcggatgaaacggcagatggaatatcccgcgctcggtgaggtgtttgttttagatgaagaagaaatacggatcattcagacagaggcagaaggaatcgggcctgaaaacgtgctcaacgcctcctacagcaaattaaaaaaatttatcgagtcagcagatggatttacgaacaatagctacggcgctactttctcttttcagccctacaccagcattgatgaaatgacttaccgtcatattttcacacctgtattgacgaataaacagatttcatcaattacgccggatatggaaatcacaacgatccctaaagggaggtatgcgtgtatcgcgtataatttttcgcctgaacattattttctcaacttacagaagcttatcaaatatatcgcggaccgccaattaacagttgtcagtgatgtatacgagttaatcataccgattcattactccccgaaaaaacaagaagaatatcgagtcgaaatgaaaatacggatcgctgaataataaagcatagaaaaagagcattttttgaaacaaaacttcaaaaaatgctctttttgcttatttagtaaacagatgtcttctcgtcaatcgattctaaaatttgtttcactcgtccgaggaatcgtccgcacacgagaccgtcaagcactctgtgatctaatgacaggcacagattaaccatgtctctgacagcaatcatgccattgtccatgacaaccgggcgtttgacgatggattctacttgaagaatcgcagcctgagggtagttgataatgcccatcgactgaacagacccgaacgaacctgtgttgttgacggtaaacgtgcctccctgcatgtcatctgcagtgagttttccgtctcttacttttttagctaggccggtaatgtctttcgcaatgcctttaattgttttttcatcagcgtttttaatcaccggaacaaataaagaatcctctgtggcaactgcaattgaaatattgatatcctttttctgaataattttgtcccccgcccacatgctattcatttgcgggaattcttttaacgcctgagcgaccgcttttacaaaaaaggcgaagaacgttaaattaaagccttctgtcttcttaaaagaatcttttatactgttgcgatatgcaaccatatttgtgacgtcgacttccatcatcgtccaagcatgcggaatttctgttttgcttcgcttcatattggaagcaattgcttttcttacacctgtgacagggatttctttatcaccggctgcagacgcaggatatgacgtctcttcttttggctcaggttttgatgcagacttcggtgcaggagctgctgttttcagctcctcaggattctgttcttgcacgccgcctgtttcaattaagcgctgaatatcttttcgtgtgatgcgcccgccggcaccagttcctgtcacttgatcgaggtcaatgccgtgctctccggccaaacggagaacagctggcgagtagcgctttttattgggctgatcggctgctccagcactttttgcaacagggttctcagcggcttctgatgctgctggctgttcttgtttttgttcagccggattcgcgccttctgtttcaattttgcaaatcatttctccgacttgcagggtttggccttcttctcccacaagctctgttatcgtaccagtaaaagaagacggaacctctgcatttaccttatctgtcatgacttccgcgatcggatcgtatttgttcactttatcaccgggggcgacaagccatttgctgatcgtcccctctgttacgctttctccaagctgcggcatcgtcatttgttcaattgccatgattgtatcctcccttacgtctttaaaactccgctaattctctcatcgccgcttccactttatcagggttgaccataaagtatttttccattgtcggcgcataaggcatagccggaatatcaggacctgcaagccgtttgatcggcgcgtctaagtcgaacagacaatgctcggatataattgcggctacttcgctcatgatgctgccttcttttgtatcttctgtgaccaaaagaacctttccagttttggacgcagcttcgatgatggcttctttatcaagcgggtaaactgttcttaaatccaccacatgcgctgaaatgccatctttttcgagacgttctgcagcttgtaaggcgaagtggacacacaggccgtatgtgatcactgtgatgtcgtcgccttccctttttacgtccgccttgccgattggcaggacataatcatcagccggaacctcgccctttatcagacggtatgcccgcttgtgctcaaaaaacagcacggggtcttcgtcacgaactgcggcttttaagagccctttcgcgtcatatggtgttgatggcatgacaattttcagtccgggctggttggcgaaaattgcttcgactgattgagaatgatacagggctccgtgcacgcctccgccgtatggcgctctgacgacaatcggacagctccagtcattgttgctgcggtagcggattttagccgcttcagaaataatttggttgactgccggcataatgaaatcagcaaactgcatttcagcaatcggtctcattccgtacattgccgctccgataccgactcctgcgattgcagattcagcaagcggcgtatccataacgcgctcttccccaaattgttcatagagtcccgctgtcgctttaaacacaccgccttttcttcctacatcttccccaaggacgaaaacgcgagaatctcgttccatttcttctttcatcgccaaattgattgcatcaatatatgacattactgacatttgttcttcctccctacttcgcataaacataatcaagcgctgactcaggagctgcatatggggcgttctccgcttcatccgtcgcttcatttacgattgccataatttcatccagcatggtttgttctatctcatcggacagcaggcctgtttcctttaagtaagcttgataagtaagcaggggatcactttttttcgcttcctctacttcttcacggcctctgtagctgctgtcatcgtcatcactggaatgtggtgtaaggcggtaagaaatcgtttcaattaatgtcgggccttctcctctgcgtgccctttcgcgtgcttctttaaccgcttgataaacttccagcggatcatttccattcacagttacgccaggcatcccatagcctatggcacggtcggaaatgttctcacatgcgacttgcttatcgtaaggcactgagattgcgtatttgttgttttcacacatgaaaataaccggcagcttatggacagcggcaaagtttgccccttcatggaaatcgccttggtttgaagacccttccccgaatgtaacaaaggctgcgatatcctttttctccatacgtcccgcaagcgcaataccgactgcgtgcggcacttgcgttgtaaccggagatgatcccgtcacaatgcggtttttcttttgtccgaaatgtcccggcatctggcggcctcctgagttcggatctgctgcttttgcaaacccggacatcattaagtcctttgctgtcatgccaaacgcgagcacgacacccatgtctctgtagtacggcaatacataatccatttcacggtcaagtgcgaaagccgctcctacctgtgctgcttcctgtccttgacaagagattacaaatggaattttgccagaacggtttaacagccacattctttcatcgatttttcttgctaacagcatggttctatacatatcaacggcttcctgatcagtcagccctagtgcttgatgtcggtttgtactcattcaagcccctcctttatgcttttaaaaatgaatggctttgccatctgcggcaagcgcagcttctccaattgcttcagaaagcgttggatgcgggtgaatcgtttgcccgacctcccacggtgttgcgtccagcactttggcaagacccgcttcagaaatcatgtcggtgacatgcgggccaatcatatgaacgccgagaatatcatctgtatctcggtcagccacgattttgacaaaaccgtcgctttcaccgtatacaagcgcttttccaatcgccataaatgggaacttgccgattttgacattatgcccgttcgcctttgcttcgtcttcggttaagccgacactggcagcttcagggcttgagtaaatgcacttcggcacaagcgtcggatcaagcggatgcggattgagacctgcaaaatgctcaacagcaataattccctcatgtgaagcaacgtgagctaactgcaggccaccgattacgtctccgattgcataaatatgagattccttcgtttggcagctttcattgactgaaatcatgccattttcagtaacaatatcggtgttctctaggccgatgccttcgatatttgcctgtctgccgatggaaacaagcattttctcagcagaataggtaacggtttctccgtctttttccgcttgtatgctgatatcgtctgatgtttttgtcattgtgtcaggcagcacttttgcccctgttatgaactggatgccttttttcttaagaagactttccatttcttttgaaatctctagatcttcagtcggcaatatgcgatccgcgtattcaataaccgttaccttaacgccaaaatcatgaagcatagacgcccattcgataccgataacccctccgccgacaatgatgattgactgtggcagctcctccatttggagcgcctcatctgaagtcagtacagacttaccgtccacttcaagacccggaagcattctcggtcttgatcctgttgcaatgatcacttgtttcgggatcagcatgtcattttcttcgccatttccccgctcaacagaaattgttcccggcagcggagagaagattgacggtccaaggatacgtccatatccggtgtacacgtcaatttttccttttttcattaaatgatttacacccgctgcaagcttatcaacaacggcttgcttacgctgctgcactttttcaaagttgagggacacgccagccgtttccactccgaattgatcggcttcacgagctgtccggtatacctctgcgcttctaagcagcgctttactcgggatacagcctttatgcagacatgttcccccgagtttttccttttccacaacggctgtttttaagccgagctgagcggctctgatggccgcaacataaccgccggtaccgccgcccagaatgactacgtcatactcagttgccatggtgactcactcctgtctgtctattcaatacgatattgtttggattgctcttcgccctgcaatactcttagcgccccttgggcaagagactgcagttcattttcacccggataaactaaaacgtctgaaatccaatctatgtatgatctgatagcagaaacaaagctttttccgtacgcaaggcctcccgtcagcacaatcgcttcaacttcgccttttaacgccgcgctggctgccccgatttcctttgctacctgatatgccatggcatcataaatgaagcgggctttttcatcgcccccttgaatcatctgttccacttttactgcatcatttgtaccgagatagcctaaaagtccgccggtgccaacaagctttttcatgatttcttcttttgtatattcccctgaaaaacatagatcaacaagatctcccgcaggcactgttcctgctcgttcaggactgaatggtccctcgccgtgcaggccgttattgacatccaccactcgcccgcggtcatggacgccaattgtaatacctccgcccatatgggtaataatcattttcatgttctcatatcgtttgccaagggaggctgccgctttacgagcgacagctttttggtttaacgcatggaaaatgcttttcctttcaatttcaggcatgcctgaaactttcgcaagcactgacatttcgtctacgacaacagggtcgacgatatacgaagggatattcaggccgtcagcgatttcccgcgcgataatgccgccgagattagaagcatgctgaccggcgtagccgcttttcaaatcctcaatcatctcatcattcactacgtaggtcccgccttcaattggccggagaaggccgcctcttgcgcagactgcatcaaactttgaaatattgattccctgttcatgaagcgtttcgagaatatggtttttacgaaattcatactgatcaataattcggtcaaatcgctgcagctcttctatgttgtgtctcaatgttttttcaaaaatgcttctttcgttatgaaaaacaccgattttcgttgaagttgagcctggattaattgtgagaatgcgtttttcgtcatgtagcactttcataacctccagatcaatttcttaacgtctgcttaatacactgtggccgttttgcaaaaactggcttcttgagcggcgcatgcgttcaatccgttcctctgctaagcggtcagccgctaaatatgcaggaatgccgtcacgctgagaaatctcaagtacacgctcgatattgccgtaaatgccttcaacttttttcaatgcacgttctgcattatagccgtaaagctcatctgccacgttgatgacaccgcccgcgttaatcacgtaatccggtgcataaacgatgcccatttcgtgaatttgatcaccatggcgtgtctcttttaattggttgttagccgcacctgcgatcactttcgccttcagctgtttaatggtgtcgtcgttaatagtcgcaccaagggcacacggcgcataaatatcgcagtcttgtgaataaatgtcatcaggatctaccgcacgggcgccaaaatcttcaactgcacgctgtacagattgtttgttgatatccgtaacgattaagtttgctccttcttcatgcaggtggcggcaaaggttataggctacgttcccaacaccctgtacagcaatggtttttccttcaagagagtcggttccgaaagcagctttagctgctgccttcattcctctgtacaccccgtacgctgtgactggggacggatttccagaagagccgaaagcaggagaaatccctgtgacatagtctgtctcatcatgaatgatatccatatcctcgaccgttgtgcccacatcttcagccgtgatgtatctgccattcagtccttgaatatagcggccaaacgcgcggaacatttcctcatttttgtctttgcgcggatcgccgataatgactgtttttccgccgccaaggtttaagcctgccgccgcgttcttataggtcatgcctcttgccaatctgagcgcatcttcaattgccgcttcttcattttcatatgtccacattctcgttccgccaagcgccggaccaagcgttgtatcatgaatggcgataatcgcttttaatccagattgttcatcctggcagaataccaattgttcgtaatcgtatttctccatatatttaaaaagttccatgttcgttcctcctaatgtgtgtattcttcagatgcgcatattgccagcgcaatggaatacagtttattttcagcagagtccgctctgcttgttaaagcaatcggtgcttttgctcctgtaatgacagccgccacgctggccttggcaaaataaatcagtgatttatataaaatattgccggcctcaattgttgggacgagaaggatatctgcgttgcccgctacgtctcccgaaatttttttctgggccgcggcaatttgtgaaactgcgttatccaaagcaagcggtccatcaacaatgcagcctttgatctggccccttttgtacatttgagctagagcagctgcattcacggtcgcttccattttagggttcaccgtttcgaccgctgcaagggcagctgcttttggcatattgttccccactgcatgggccacatgaacggcattttgcaaaatctgccggagctcttccagcgaaggagcaatattcattgccgaatctgtcacaaacatcagccggtcaaaatccggtatatcgaagacagccacgtgagaaaggacacttgctgaccgaagcccctcctgtctgttcaataccgctttaagcaaaacagaagtcggcacattgcctttcattaaaacgtccgctgttttatgatgcacagcacgaaccgctaatttcgccgattcctcaggagtattggcatggacgatttccacttgatgcccttgcatggatgatgtcagctcgttcagttttttgctgtcgcccgttaacaagaaacgggcggataggtgctcggctgccagctttacagcccggatcacttcctcatcctcagcatgagcaaccgcaatggtcttatttttgtgtatcgacgctttgccgattaaatctttcagcttcatctgttaccacctttcttgtttcgactccgccttttattatgcaagttccatgccagctcttaagggtgctgtcataccaggtataccgaaacattcgtgcagatgtttgcgtttattctgcaaattattgcatgccttcatttgcaaggccatatttatccattttgtaatataaattccgaatgctgacaccgagagcttttgctgtttttgtccggttaaaatgatgcttttcaagcgtttgctggatcaaatgcgcttcaaatttttctactgcgacagacagcttttcgccttcaatatccggaaaatcaaaacctgttccctgatctgtgtcattttctttttgctcaagttcgaatacaggcaagtgatctttttcaatccattccatatgcggattcagaaaaatcatggctcgtccaaggacattttcaagctcccggacattcccaggccaatggtaggcagataaggcgcgcaaggcttgctgtgagagcccttttacattcctgccgtaatcccggttgatcttttggataagtctgacgctcaatgcttcaatgtcctccaaccgctgccgcaaaggcgggatggagatcggatagcgattgatccggtaatacaggtcttcccggaatgttccgtccgccatcgccttttcaatatttacatttgtcgccgcgatcactctgacgttgacagggatcgctttcgtgccgcccactctgacgatttccttttcttgaaggacgcgtagcaatttggcctgcatattttgtgtcagctcaccgatttcatctaagaaaatactgccgttatttgcttcctcaaataaaccctttttaccgccgcgcttcgctcctgaaaacgcaccatcctcatagccgaacaattctgattcgagcaggttttcagaaagggctgcacaattcacgcgaataaatttattgtatttccggtcactttcgttatggatggcatgggcgaacagttcttttcctgttcctgattccccgcgcagcaagatggttgccggtgttttcgcaccgagcttcgcctgctcaagcgcaaccagcatttgctcgcttttgccgataatgtcgtcaaacgtgtatttcgcttcaagcgtgcgaataatttgtctggcgcgattaagctccgctgtcagcattttaatttcggaaacatcgtgaatcacgccgacgctgcctttcaaaatcccgtccacaatcaccggtgctacattaacgatcacttctttttcattcgggccgaccttcattctgacaccgcggacaggacgtcttgtttcaagcacctttaaatgcatgctttcgccttcggaaatatcagtgtttgcaggcttgccgatgacttctttttcagaaagccccgtcattttcgtatacgctttattgattagcaggccgatgccgttttcatcaacgacagaaatcgcctcatcggaggattgaataattgcctccagcatcgtacggacctgctttaagttggtcacttcctctgccagctcgaccgcatcagtgatatctttaaacacacaaagagccccgagcagacgtccgccttcatcaataatcggcagtcttgtggtcacaatttgcaaatgatcgcctaacagctgcttctggttgtattcaggcactcttgtttttaaaatccgcggcatcttagtgctcggaatcacttcttttattgggcgcccaatgacttcctcacgtttttttccgaccattttttcggccatatggttaaagagaatgatttcttcattgatatcaataaaaatcattccatcatgggtggaattaaaaattctgtcatatttataggtttgctcttttagcatttgaatcaggtgctgcttttcttccatcagctgaaaaacgatgtatgccatttttcccggcatgacaatggtatcttcatgctttctttgaaggagctcgtcaaacacggcttgatcgccggtagtatgaatgacgatatccggtttttgttgtatgtaaggtttccaatcagatgatacggcaatcccatactgttctgcttctttcaatcccggcgcctcggggtctttgtcaactacggcaatgatatctatgatggctgttttaatcagaatatgtaataacgccgttccccttttgccggcacctactatcagtaccttttgcatcccgatacccctttgtatgaaaaaatttgcacacctatttattccgttgcaataatttgcacaaccctatgttaccacgttttcttctcttgacaaaatattttttccgctggacaataaaggaaatgaaaagataaaggggttttctgaagatgagccgacttcttgcgcttttaatattagtcatccccggggctatttctgctttaggcattaaactgatgagagatacacttttcggccatacaatcaagccattttcagctctttggctccaagggttgtcaggattcatcttttttgcgatcggcctctatgtgctggccgggttcattttatacagagacagaaaacgcaatcaagtcagcccgcgattcagaaaacgatagctgaaaaaaagccggagaatgctccggctttttttgttgcattattcgtcaggcaaaacggtcttggcaatcgttttgtctaacgcttcatagtcataataagaaatcgtatcgtacagttcttttcgtgtctgcatatcatgaagtccttctttttgtgagccgtgctccttcatcaaaccaaacatccgctcacaagcttttgccgccgctcgaagcgaggtgacaggatatatcaccatgtgaaaccccatatcttcgaattcatcggcacgataatatggcgttttcccaaattcagtcatattcgcaaggagcggaacggggatacgctcagcaaactggcggaattcattctccgcctgtagcgcttccgggaaaattgcgtccgctcccgcctcaatgtaagcctctgaacgttttattgcggcatcaagcccttcctgcgccctggcatcagtacgggcaacaacaataagggagggtgccgcttgtttaatggcttttattttttgcgccatttcctttatcggaactagctgtttgccatttaaatgtccgcatttttttgggagctgctggtcttccatttgaacggctgctaccctggcttcaagcatctcccgggctgttcgggcggcatttaagacaccgccaaatcccgtatcgatatccacaagcaaaggcagatcagctgcacgcacaagatctttggcccgttcagctatctctgccgatgtgatgatccctaaatcaggcagccccctgctggctgtataggcagcaccggacaaataaatagcagaaaaaccggcttctttcgcaagcaaagcggccatcccgtcatgggcgccgggaatttgaagaatgtccggtgctgacatcagcttgcggaaacgcccggcaagctcctcttgtgacgattgcttattgacgatccacgacatgaaacaaaatcccccttttacatgcagaacatgtctacgaattcatttacgcgcatcgtttgtaatgtctcatagctggtacagcgctcataaatgtgtttgtgctgtttatcaggaaaatgggttttgagattgtcagaaaacttttccagcagtttcggcactgcttcctctcttcgaaaacgatggccgaggggaaactcacattccaccatttccgtgctcgttccatctttaaaatgaacctgaacggcatttgagatggagcgtttatcaggcttcaaataatcctcggtatatgttttattttcagtcacttccattttatcacgaagtttatctattctcggatcattcgctgtttcagcttcataatgctgtgcggtgatatcaccaaaaagcaaaccgattgctgtaatgtattggaggcagtgatcacggtctgccggattgtggagcgggccttttttatcaatgattcggatagctgattcatgcgttctgatgacaactcggtcaatctcgtcaatccggttctttacctgcgggtgaagaatgacggcggactccgccgctgtctgggcgtgaaattccgcaggataagacactttaaataacacattttccatgacataagcgtcgagcggacgggcaagcttgatctctttcttattgaataaaacgtcttggaacccccaacccggtgcactcaaggctgtcggataacccatttccccttttaacgacatcagcgccaaatgaacacctctgctcgttgcatctcctgccgcccatgatttacgcgagcctgtattcggtgaatggcggtatgtcctcaatgctgcattgtcaatccatgcattcgaaagcgcatttttgatttcttctcttccgccgcccaaaagctttgctgcaacagcagttgtcgcaactttgacaaacagcacatggtcaaggccaactcgatttaagctgttttctaacgccagcacaccttggatctcgtgtgctttgatcatcatctcaagtacgtcgcgtaccgttaacggctcttttccttcagacagcctcactcttgatacataatcagcagcggcaaggattcctcccaagttatcggatggatgcccccactccgccgccagccacgtatcgttgtaatcgagccagcgaatcatgcagccaatattaaacgctgccctcacaggatcgagaacatatgacgttcccggcactttgcttccattcggcacagtcgttcctggaacaatcgggccaagcagctttgtgcattccggataccgtagcgccaagattccgcagcccagggtatccagcaatacatgccccgctgttgtatacgcttcggcactagtaatctctttctcaagcacatagtctgtgatttcttcgataacacgatccgttttcggcattctaccagctcctttcatgattttgtttgatatcgcgggcccatgtaactgacacggggacggaagagccgattattggcatgctgttcgatcacatgggcgcataaaccggacgttctcgcgctgaaaaagatcggcgtatataaaggaatcggtatgccgagcatccaatacactggggcagcatagtaatccaaattcgggtaaagccctttttccttctccatcagccgctcacccgcttcgcacatctcatataaacgatggtcaccggctttatcgcataattgctgcagcgcctctttcatcatgagtgctctcgggtccatttttttcatatacacccggtggccgaagcccatgattttttcttttcttttcagttttgtttgcaaaagctgctcaaaatcagatgtcgtttttgcctccaaaagcaaatacatcacagcttcgtttgctcctccgtgaagattccctttcagggaagcgacagccccagtcaaagccccataaagatctgaatgtgtagatgcaatgaccctggccgcaaaggttgaattcggcatctcatgctcactgtacaggacgagcgaccggtcaaaaatctgttcttccaatgaagacggcaatttccctgtcatcatgtagagaaaattcgcactgtaggatagggtttgaagcggaagaatcggttctttcttattaatgatcctgtagctggcagcagtgagggcaggcattttcccaagaagctgataggcgcgttctttgtttgcggaaggagaccgatcatcaatttgccgatcatagccagcaagtgccgacaggccggtacgcagaccatccattggatgagtgtcctcagggagcagctcaagcagacggagatgatcagcaggcaggcttgaggcactgtttattttacgttccagcgtttccatttcactttcttctggcagcctgccctccagcaataaatggacaagctccagatagctttttgtttcagaaagttctattaaatcatagcctcttatcaaaatctggctggactgcgtgtcaagataagaaatatgagtttctgccgcaatcacaccgtccaaccctggagaataatgctgtttctcctccatatcctcaacctccgtttttgcgttttttgtctatcaggttccgccaagcaaatacttggaaataatcagtctttgaatctcgttcgtcccttcataaatttgcgtcacctttgcatcgcgaagcaggcgctcaactggataatccttcatatagccatatcccccataaatttgaacggcgtctaacgccgcctttacggctgcatcggaagcaaattgtttagccatagacgcttcttttccacagtttaggccgcggttatgaaggtctgcagcgtggtagacaagatgtcttgccgcctcagctctagtcgccatatcagccagcttaaatgatatgccttgattggctgcaatcggccttccaaattgcactcgctgcttcgcataatcaacggcatgctcaagagccgcctctgcaattccgagggcctgtgccgcaatgccgatccggccgacatttaaattcgccatggcaatgtgaaagccatccccctctttgccaagcaaattggcttcaggcacttctgcattatcaaaaatcagttccgtagtattggagccataaagccccagctttctttctttttttccaacggtaaaaccgggtgtgtttttttcaacaataaaagccgaaatcccgtgcctgccttgatctggagctgttaaagcaaatgtgatatagatatcagctgctccgccattcgttatgaatattttcgatccgtttaataggtatttgccgttctttttgattgctgttgtgcggaggctcccggcatccgaccccgagtgaggctccgttagtgcaaatgcgcccaaatggtctcctgacgcgagatttggtatatatttcatcttctgttcttcgttgccgaaatacagaatcggattcgtgccgactgaggtatgaacggagagaatcacgccgacagccgcgctgattctagaaatctcatgaattgccaaaatataagaaacaacgtccgctccagcaccgccgtattgttccggcaccggtattcccatcagtccgtgtttacccatttttttgatcagctgaaagggaaattcgtccgttttctccatgatttccgcagcgggagcaatttcttttcgtgcaaaatcacgcaccatttttcgcatcatgacttgctcttgggttacatgcaactcggccacccccggatggaatagacttcaggaagtcttctcctcatagtcataaaaaccgcgtccgctctttttgccaagccagcctgctttgacatacttgcggagcagcgggcaaggacggtatttggaatcgccaaggcctgagtgaaggacttccataattgataaacacgtatccagtccgataaaatccgctaatgcaagcggacccatcggatgattcatgcccagcttcatcacttcatctattgcctccggcttcgccactccctcatacacgcaatagatggcttcattaatcattggaagaagcacacggttggaaacaaacccaggaaaatcattgacttctaccgctgttttccccatcttttccgctaatgccataacatctaaggccgtttcttctgatgtagccaagcctcgaatcacttctaccagcttcattacagggacgggattcataaaatgcatgccaataacccgttgaggccggtttgttacagcagcgatttctgtaataggcaaggaagatgtattgctggccaaaatcgtatgaggcgggcaaatgcgatcaagtgttttaaacatctcagtttttgccgccatgttttctgcgatagcctcaatcacaatgtccgcatgctctgcctcctcaagtgtttgagaaatcgaaatgcggttgattacgctcttcacttccgtctcggtcctttttcctttctcagcatcacgggccagctgtttcttcagccgtttcaatcctgcctccgcggcctctggattcacatcatacatccgcacataaaagcccgcgtcggcggctgtttgagcaattccgctccccatctgacctgcgccagctaccatgatttgtttgatttccattcaaatcccctttttcatcatgttttaatgaacctgcactaagacggcgtctccctgtgctgccccgctgcaaatagcggcaacgcccagaccccctccccgtcgctttaattcataaacaagcgtcatgagaattctcgcaccgctcgcgccgatcgggtggccgagcgcgatcgcaccgccattcacatttactttttcaagatcgaaacctacgattttttcacatgtcaaaacaactgaagcaaaagcttcatttacttcaaacaagtcaatatcttggacagttaaaccattctttttcaggagcttgttaatagcaaaccctggcgctgccgccagctcgtgcgctggcattcccgtagttgaaaaaccaagaattgtagccagaggccgtttgccaagctcagcagctttttcctcagacatcagcacgaacgcgccggctccgtcattgactccaggagcattgccggctgtgatagaaccgtcacttgcataaatcggagcaagttttgcgagctgatccagacttgtgtcacggcgaatcgcttcatctttatcaacaacgtttggttttccttttcgaccgatccagttgacgggaacaatttcatcctgaaacttcccttcatcggcggccttagctgcccttgcatgacttctcaacgcccattcgtcctgctctcttcgtgagattgcatattccttggcagctgtatttccgtgaacagccatgtgcacctcgtcaaatgcgcacgttaatccgtcatacaccattaagtccctaagctcgccgtcccccatccgtgctccccagcgcccggcgggaacggcatacggaatattgctcatgctttccatccccccgcaacaagtatgtccgcatcctgcgcccgaatcatttgatcacataaagtgacagcgcgaaggccggaagcacagactttattcagtgtttctgacggcacactccaaggcattcccgccagacgggcagcttgacgggaaggtatctgccctgagccggcctggacaaccatgcccatgacgtttccttctacatcatctccagagactccagcctgttgcagcgcctccttcatcacaatgcccccaagctcagcagctttcacctctttcaaaactccgccgaatttgccaaatggagttcttgcagcacttacaatgactgttttcctcatggtttcacctcattcagaagatagacagcgcttacaatttctagttgtcttctatgaatgtatgctttgaaacgggcatgaatgaatgaaaaaagaaggctgcgtcaaacagcctccttctaacaactattcatttttcagcaatgccgaagccttttctggaaagtcggtaaacatgccgtctgctcccgcttcaatgagacgcttcatatcttccggacgattgactgtatacggccttaccttaatcaaaccgttcctcattttcttcagtacttcatctgtgacccctgggctgtttatcttcgggtgatagccggaagccggaatagacgcgatatatcgatctgcctgataaagcacatctgaagttaatactgcccgttcgatatgcggtgcaagccgggcgcacagcgccaagctgtcatgattaaacgtggataggatgactctgtcctctacattaaatcgcttcactgcctccagcactttttcttccattccctcatagcggatcacgctgttttttaattcaatgttgatgagaaaatccttttttaccgcccacgagagcacatcttctagcagcggcacttttatatcgctgtacgcttgatcgtgaccagcggccgcattcgcagtctttacctcatcataggctgtatccttcacgaatcctttaagtgatgtcgtgcgattaagtctttcatcatgaattacaacaatgcgtccgtctttcgtcagctgtacatcaagctctatcccatccgctccggcttcaattcctttttcaaatgcaagcattgtattttcgggaaattgacctgatgccccccggtgggcaaaaatctttgtcatcgtttcacctcaaaccctaaagttttctccattatacttattttgtcggctccactctaggattaaggctgtatcaatctactgatcataataagaatcaatgccattgacaatcgcatctgcggccttttgctggtattcttcacttcccagcttgtccgcgtcagagctgttcgtgataaacccaagctccgccaacacacttggcatttgtgaatatgtaatgacgtaaaagtctgattctttcacgcccctgtctctcgtttgtaaggaagaaacgagctgtgactgaatatcggatgccagacgccggctgttctccccttcataatcagattgaaaatacgtttctgttcctgaagctgaagcaacccctgaattcacatgaatgctgacaaaaaggtcagcctgattggcacttgccttagccactctttcctccaaggtcagaaaatgatcgtcagaccgggatgcaacaggattggctccctcctcttttagtttgtctgtcacatgctctgagacagccaaattaatatccttttcaaagagcccgtttccgaccgctccactgtcttcaccgccgtgtccggcatcaatatacactgttttcccttctatcggctctgctgcctgtgcacaaggcgcgagcgtcaaagccaatccgcacagcgccaagctcctccataacattctcaacttactccctccggtcacgagttctttcgcagctgaatatcttccagctgtaaagttccattatccttctttgtatatttcaccaggacatgtgtctgatctggcagtgattcacattcatcacgtttatccttcggaacttgtatcatggtttcttctccattaagagaaaccgcaatcgtatgaggatcagccgagccaatgtattttccctcttcggtaaacctcggcactgagtcatccgcacttgcaacactgcaccccgaaagaaagagcgcagtaaacagcaaaagaaccgtttgtttcacatgaccacctcttcctgatgtttggcttttatctttgaccagaatggagaatttgtaaagacaacgcgaatgcaggcgagcaagttccatgattttcaaaagggctatacgacccgatcatttcctgttgttagaaagataacgagcagatttgtctatgaggatggctctaattgaggcgccaattagaaaaaattagcggaaagaagcaactttttattcattttaaaaaatttgagaatagggtgagcaaatcgtttgacgggtgggtcagccaagcgtaaccttttaaaggatatttactttattgaaagaagttaaagccatgaaaaaattcgttctgctgctggcggcagctgtcatcacatgctccatcggccaccaaatcagtggcggctacaaaggccccgaaaaagagcggccaaaacatcactctgcactcaagatattcagtcggtaaagcagatcaattgcattaatttttacatataggctagaatatgtgcgaatccaaacgaaagaagatgatcaaatgaatcctaagtataagccactttttgaaccatttacgtttaaaagcggcgttacaatcaacaaccggatcgcagtagcaccgatgactcattacgcttctaatgaagacggtacaatatctgaagcggagctcgactacatcatcccccgttcaaaagagatgggaatggtgattacagcctgcgcaaatgttacaccggacggaaaagcattccccgggcagccggccatccatgacgattccaacattccaggtttaaaaaagttagcacaagccattcaggcacaaggcgctaaagctgttgtacaaattcatcacggcggtattgagtgcccgtctgagctcgttcctcaacaggatgttgtggggccaagtgacgtgtttgataacggcaaacaaattgctcgcgcattaacagaagaagaagtggaaaacattgtgaaggcgtttggagaagcgacaagacgcgccattgaagccggctttgacggtgtcgaaattcacggtgcaaacggctacttaattcagcagttttattctccgaaaaccaaccagcgcacggatcgctggggaggaagcgatgaaaaacgattagccttcccgctcgctattgtcgatgaagtgaaaaaagccgcttcagaacatgcgaagggtgcattcttagtcggctaccgcctgtctccggaagaacctgagacaccgggattgacaatgactgaaacttatacgcttgttgatgctttaggggataaagaattggattatcttcatatctcactgatggacgtgaactcaaaagcgcgccgcggtgcagatccgactcgcacacgcatggacttattgaatgaacgtgtcggaaacaaagtgccgctgatcgccgtcggttccatccattccgctgatgacgcgcttgccgtcatcgaaaacggtattccactggtcgctatgggacgcgaaattctagttgaccctaactggacggtaaaagtaaaagaaggccgtgaaaagcaaatcgaaacagtgatcaaaggcacagataaagaaaaatatcatttgcctgaaccgctatggcaagcaattgtgaacacacaaggctgggtgccttataaagattaatgtgcaaagactgccgaaacgattcggcagtcttttttccctttatataaatagtttgtgtacacatctaaacagcaaaagaaagagctccccaccaacttcgaaaagaaaatccaggaaaaacccctcacgctttcttgcttttttctttttcattcgtacgtctcctttttacatgaatacgccttacttacgattttgcaggagaaaggtttcattttataacggacacatctagggtcgatcatgcttcgtgatcctataagatgtatgaatggaccaagagtgcaggtaataccgccatttgctttccttacttttcaaacctatcctttactatatgcggatacttaatattcttctcccatactacaaatgtccccaaaacaaaacgcctcctatttatcagcgcaaactaataaataaaagacgtttgatttaatgaccacttaataagctcatgtttaagaagccttatgctctaacctcagcttatccgcaaccattgcaatgaattcactgttggtaggtttagcttttgtcatgctgacagtataaccaaacaacgaggaaatggaatcaatgtttcctctgctccatgccacttcaattgcatggcggatcgctctttctacacggcttgcggttgtgttaaattttttggcgatgtccggatagaggacttttgtaatgctgccgagcaattcgatgtcattgtataccattgagattgcttcgcgcagatagagatagcctttaatatgggctgggacgccgatttcatggataatgcttgtgatgctcgcgtcgagatttttcttctttggttcaggctggctgctgcgtataatactgctttgcgatgatggcgcacgatgcgtcacactgctggcatttccgctgacctggcggatatggccgacaaggttttccatatcaaacggtttgagaataaagtaggacgcgcctaaatcgacggcctttttcgtgacatcttcctgcccaaaggctgtcagcataatgacattcggctgttttttcagatctgattccctcagcctctctaaaaccgcaagtccgtctagatgcggcataataatatctaatacgagcacatcgggatctttttctttaaacagcgacaggcattcctgtccgttataagcaacgccgatcacttccatgtcttcctgtccttctatatattcacttaacaggcttaccagctctcgattatcatcagcaacacaaactttaattttctccacgtttcttcctccccaaatgtagttaacaggattcacccttgctacatgtttacattcgacaaaaccgctatataccctctaaaaaaatcataatcaccaatattagtggcatatctttgttattctatgtttttctctgtttttcgactaaaaatgaaatttgacaaacaaggaaacgtgaatttgtcgaaaaatcttcttttgtatattttaccgtatgtattctgagaagtgaagagggatcaaaataaaaaaactgccggaaactccggcagtcagcttgctttttcttttccataaatatcgattcctgcttctgacagcatccattcaatatgaacaccgtagccgcttgtcgggtcatttacaaatacatgggtgacagcaccgatcacttttccattttgaatgatcgggcttccgctcatcccctgtacgatgcctcctgtttctttcaacagtcttggatcggtaattttcaacaccattccttttgtcgcagggaatttttgcggcgttgtgctgacgatttcaatatcgaatttttctactttgtcatcatcaataaccgttaaaatttcagccggcccttttttgacttcggtagaaaacgcaaccggcaatgcttgatctgatatgttgttttgaatcggctgatgcagtgtgccgaaaatcccaaacgggctgtttctgttaatatccccgatcgttttgcgttctgaggaaaatcgcgccagtttttctcccggattaccgcctgtccctttttcaattgatgttacagtggatttaacgatttctccattctccactacaattggtttctttgtgtccatatcggaaatcacgtggccaagtgctccgtatttttttgttttcggttcataaaaggtcatagtgccgatgccagcagcagaatctctgatatataacccgattctgtatttgccttctccttcatccttttctgggatcagcttcgttttgattttctgtttatcacgtttgatcagtaagtctaaagattcaccagttttcccagccttttgaataaatggggctacatcattcattttttcaattttctgtccattcatctcaataatgatgtcgcccgcttcaattcctgccgtttctcccggagattttttgccttcacttgtattgatttgatgaaatccgacgacaagaacaccgacggaatgaagttttacaccgattgattgtccgccaggtataacttttaaatcaggaagaacatgcacttttgtttttttaattggaaatccggcaagatcatataccaattctgactcacctgattttttgcccgtcaccttgatttcatgcggatctttctttactgtaaacgcttctgaggattctgatgtctgagcgtttaccgataaactcgtttcaatcgcttgtgtttgggtttcaaatactctcatttgcgttggaatcagtaaatattcttttagcggtttgcataaacctacacttaataacgaaacaaggagaattaaacctactgcttttctgatgttatcgggcattcactacttcactctcctcgctcctatcccacaccttctttatgacttgctgctacatcatttaattttgccttctgacggcttatttataactgtcatatgaagaaaaacattggatatactgatgaacgaatggatgtgcacgaaaaaaataagctgcgcttctcgcgcagcttacccagttgttttgacttgatccgcttgttttaaaagttctttcgcatggcgtttcgttaagtcggttacttcgacacctgcaatcatgcgcccgatttccgctaccttttcctgcttagagagcggcttgacacgtgtcgtcgttctgccgtcttttaactccttcgcaatataaagatgcgtatcggccatggcagccacctgaggcaggtgtgtaatgcacagcacttgtgatcctattgacaccttatggatcttctcagcaattgcctgtgcgaccctgccgcttacaccggtatcaacctcgtcaaaaatgatcgatgtcacatcctgttgtgaggaaaaaatgctttttatggcaagcatcacccgtgacagctctccacctgaagcgactttcgaaagggatttcagcggctcgcctgtattggttgaaattaaaaacttcaccaggtcaatcccttgttcagtcagctgaacgggctggccgtttacaagcggcgcctcttcattgcgtgacgctgttctgaccttaaattccgtatcaaaagttgatttttccatgtacaggctttttaattcccgatgaatctcatcagccagctttttcgcccatgtttttcggatttgtgacacatttgccgcttccactgcgacatctttgccgacggagtcaagctcctttttcaagctttgaaggtggctgtccctgttttcaatttggtcaatctcttcttcaattttagaagcatattccaaaatgtcttcaacagtggcaccgtattttcgtttcagctgtttgatttcattaagtcgcgtctcaatatagttcaggcgttccggatcaaattcaagctcatccagcatatttctcatctgaaatgtggcatcctcaagcaaatagtaggagttcgaaacactttcagacatttttttcagcggttcgtttatatcagatatatcttcaagctgcgctgatgccattccaacccagtccaatccgccctgctcactgcgaagcgcgttatatgcattttgcagcgactcatatatcttctcaaagtttgaaatttgctggcgctcttcttggagctgttcatcttcgttaagctcaagctttgccgattcgatttcttcgagctgaaattgaataagatcaagacgatgggccatttcctgttcgctttcagaaagctgcttaagctttttgagcagcttcacataccgctggtacccttcctgatacgttttgagcgcgctttccacttcggccccggcaaacttgtccaaaagctggagatgattttcgtcttccattaacagctggttatcgtgctgcccgtgaatatctaataaaagcctgccgatctctcttagtgaagcaatcgtgacaagcttgccattgacacggcaaacgcttttcccgctcgtgctgatatcccttctcatgacgatcatttcgtctgaaacgtcgattccctgctcagcgcatacgcctaaaacaggatggccgctctccaacagaaacagcccttcaagttcggcttttgcttccccatatctaacaaattcagatgatccgcggcctccgactaaaagagaaatggcatctatgatgatggatttgccggctccggtttctcctgttaaaaccgtaagcccgcgttcaaaagaaaccgtcagttcctcaataatggcaaagtttttaatcgatagttcagctaacaaacagcattacacctcttatctttgttagattttctgttacagcagttcaaggagcctgttttttacgccttctgtatcttcaggagtccggcaaataattaaaatcgtatcatctccgcaaatggtccccatcatttcatcccagtccaaattgtccatcagcgccccgattgcctgggcattgcccggcatcgttttcagcacaatcatatggcttgctgagtctattttcacaaatgcgtccatcaatgcccgctttagctttgacagcggattgaaacgctggtccgccggaagactgtatttgtaagaaccattatttgtaggcacttttacaaggtgaagttctttaatatcccgtgataccgtggcctgcgttactttgtatccatcctgctttagcatgtcgaccaattcatcctgcgtttcgatttcattgcttgtaatgatctctctgattttaatatgcctctggcctttgttcatgtaagcacctctatttccaagcttatctgttcttttatgttatatgattctctgcacattgtacatgaatgcagaaaaaaggaataatagcgccctattattccggtacatctgcttttttttcttttaacgtcttatgtgcttcttctacaacgcgcatgatctcttcttccggcagttcctggccttcctgtccctctcccggccaatgcaaatgaaggagaaactcaatatttccgtctcctcccgtgattggagaaaatgacaagcctttacagatatagccttcagcggcagaaaaactgatcattcgcttgagcacatcagcatgcactttaggatctctaacaatcccttttttgccgacggattcccgtcccgcttcaaactgaggcttaactaaagccatgcagtcgctgcccggtacgagcaaagtccttaggacaggcaggatgagccgcagtgaaataaaggacacatcaattgtggcaaactccggcatgccctttgtaaagtctgccggtgttgcataacgaaagttcgtccgttccatcacgacgacccgttcatcctgtctaagcttccatgcaagctgattatagcctacatccacagcgtatgactgtttagctccattttgcaaagcgcagtccgtaaaaccgccggtggaggagccaatatcaatcataattttatctttgacagagacgggaaattccttcaacgctttttcgagctttaagccgcccctgctcacatacctcagcgggtttcctttgacagttaacggaaggtcgcggtcaattttttctccaggcttgtccaagcggttttcgtttgaatagacgatccccgccataatggctcttttggctttttcacgcgtttccgccagccctctttccactaataatacatctaatcgttctttctttgacgtcatgatccaattcctttgtgtgtctttggtggcatcagtaatctaatacgatttgccacctgctgttttgtcagtccaatttcctcaagaagcgctgttacacttccgtgttcaataaaccgatcaggtatacccattctgtcaatcggagtatgatattcaccttgatcatgagcgaattctaaaatcgagcttccgaaaccgccttctaagaccgcttcttcaattgttaaaattggcaagccttcttttaggatactcttcatcatcttttcatcaatcggcttaataaaacgcgcattcacaacgcgcacggaaaggccttctttctgcagctcttcggctgcttcaatcgccatttcgattgttgtgccgaatgttaagatgacagcatcgttccctggacgcagcacctcccacgtaccgatcggaatcgttttcaactgttcatccatttttacgccgagtccgtttccgcgcggaaaacgcattgctatcgggccttcgtcatagctaagtgctgtatgaaccatgtgctggccttcattttcgtctttcggcatcattaagaccatgtttggaatgtggcgcataaacgcaatatcaaacacgccttgatgtgtctctccatcagcgccaacgagtccagcacggtcaattccaataaacacattagcgttttggcggcagatgtcatgaacaacttggtcatatgccctttgcaggaaggttgagtaaatcgccaaaaacggcttcataccctgcattgccatagctgcagccattgttgcggcatgctgttctgcgattcctacgtcgaacatccggtcagggaattcctttgcgaagccttcaagctttgaaccgacaggcatagccggcgtaatggctacaatgcgtccgtcctcgcgcgccattcgctgcacagttccgctgacaagaccgctccacgaaggagctgcggctttcggctttacaaagtcaccggtattaattttatatggtccggtaccatgccatgtcccaatcgtatcggtctcagccggtttgtaccccttcccttttttcgtaatgacgtgcagaagaacagggcctttcgtttttttggcgtattgaagattctcaatcagctcatgataagaatgtccgtccactgggcccaaatacgtaaaaccgagctcctcgaaaaacattccggagacgagcatgtatttcaggctgtctttgacccgttccgccgtggcggcaagcttgcccccaactgccggaatctttttaaataagtattcaagctcatctttgacccactggtatttccccgcagtgcggagccgtccgagcatagagtgaatggcaccgacgtttggcgcaatactcatttcattatcattaaggatgacaatcatgtcttttttctcgtcgccgatgtggttaagggcttcgagcgccataccgccggtcagcgcgccgtcaccaatgatcggaataatatattcatccgttcctttaatatcacgggcagctgccattcccatcgcgcctgacagagaagtcgagctgtgcccggtttcccaaacatcgtgctcgctttcactccgctttggaaatccgcaaagccctttgtactggcgaagcgtcgcaaattcttttccgcgtcctgtcagcagcttatggacatacgactgatggcctacatcccataaaaatttgtctttcgggctgttaaattccttatgcagggcaacagtaagctctacgacacctaagtttgggccgatgtggccgccggaagcggataaacttgtaattaaaaactgacggatttcatcacttaatttctctaattcatcaatggacatgttttttaaaaacgacgggtcctgtattgataaaagatccaaagcggatcaactcactttcagcatgaatttctgcaatgatacatgtcttttgcatgccgagctgacaataatctcagacataaaaaaagacaaacgcgcttttccttttcatttttcatataaactgcttacattttaccatacctcgtgcagccgcttcaaattaggatcgttttagtgatctcttgccgcaattaaatcacaaagctcatataaaaggtctttttgaagagagagtccgccgatcaatcgcttcgcctcttttatatgaacatccaatttatgtttggccccttccaatgaaagaagcgacgggtatgtcgatttgtcatttgtggtatccgagccgacacgtttgccgattttctcttcactgccttctaaatctaaaatatcgtctctgatttgaaatccgattccaatgtggctgctgaaggtacgcagtgtttcaatgtcttcctcaggcgcatcagccaaaatagcaccggcgattacacaaaagccaaggagcttggcagttttccgttcatgaatggattcgagctcttcaagcgtgacttgtcggttttccgcttccatatcagctacttgcccaccgaccatgccttcggtgcctgccgctgaaatcagttcattcacaagccgcaggcgcttttctgctgacacctcgtctgacacgtgggaggtaatcagcttaaagctttctgtgagcagcccgtcacccgctaatactgccgtcgcttcaccaaacactttatggtttgtcggcttcccgcggcgcaaatcgtcatcatccatgcatggaagatcatcatgaattaacgaatacgtgtgaatcatttcgacagcacagcccaccggaatgccgtctttttcgctttttccatatgcatttaaaacagccagtacaatcagaggccgcaaccgctttccgccggcctgtagagaatatagcatagatttctttaatgagtccggcatatcaagcttttctgtatagacagaaagctgattttcaattgtttttttccggtccgccagaaagctcgttaatttatttgtcaccttcgtcttcctcctgaacactgaaaggtgccagttcgccgtcttcttttaaaatgaagtccatttgcttttcgactttttgcagcttttcatggcacatttttgacagagccatgccttcttggaaatagttaatggcttgctctagaggcacatctccctcttcaagctttgatacaatgctctcaagccctttcatcgcttcttcaaatgtcatgttttcattttttttcacgtctgtcatttttcttcccctctcttttctaatacttcacaggtcagcacgccatccttcagcttgatttcaagccggtcctgctcttctatttgactgacacttttaatgagtttatcttctttataagccaagctgtatcctctttccatcacttgaagaggacttagtgcattcagcttgccaagaacggtttgaaattgggaatgcagctgcttcatttggatattcatattttttctcagctgatttgtttgttcctggtatcgtgttctcgcttgtttcagctgttcatgaggatgcaatgcctctaatctgtacgtttcacgctccagctgtctgcttttccgatctaaaagagcggtcagctgtgcttgaaactgctggtacgcgaggtcaaactgctgctctttttgcgcatacaaacgctttggaaaacgaaaggcataggacgattgcagcgtttgtatccgttcttttttctggccgagatgctgctgcattgctcttgtcattctgacttccgctgtttttgtccgttcgattaaatcagtggtatgaggcacagcaatctcagctgctcctgtcggcgtcgcagctctgatatcggcgacaaaatcactaatcgtaaaatccgtctcatgtccgactgccgatataatcggaatattggaagcaaagatggcgcgtgctacaatttcttcattgaatgcccacagttcttctatcgaaccgccgcctctcccgacaattaatacgtcgcaaatctctttttcatttgcctcttcaatgcgcgtaacgatggatctgctcgcattttcaccttgtacgagcgctggaagaacaatgacttttacaaggggatatcttctttttagagttgtaataacgtctctgacagcggcacccgttggagatgtcacaaccccgattgtggctggaaatgcggggatttgttttttgtagcggtcgtcaaataaaccttctccggcaagcttcttttttaattcttcgtacgctaaataaagcgctccaaccccgtcaggctgcatttctttggcatataattgatagtttccgctcggttcatatacggaaattccgcctctgaccagcactttcattccgttttcaggtttaaaaggcagacgctcgctttgtctcgcgaacatcaccgactgcattcttgcgttttcgtcttttaaagtgaaataaatatgccctcgtgtgtgtatctttacattcgacaattcgcctttaatccaaatattttcaaggtgaggatctacatcgaattttcgttttatatactttgtcagcgctgagacggtcacatacgctgcttcacccatgtctaaaaactcctctcctaagcattcctgcaccataactaaagaaaacccgccctggctttaggagcctgaagaagcgggtatcgtgctcatattcaaggcgggtaaacatttcgcctgtgaatatctccaattatctatgataacgtacgtttcgcagatttaacagtattatgcgcaagcatcgtgatggtcatcggacctactccgcccggaaccggcgttatgaaggacgctttttcctttgccccttcaaattcaacgtctccgcaaagctttccgttttccagacggttaacgccgacgtcaatgacaacagcgccctctttgatctggtctgcactgatgaagttggctctgccgactgccaccaccaggatgtccgcttttttcgtatgttcagtaatattttctgttcttgaatgacagtaagtaaccgtcgcgttttcatttaataaaagctggccgacaggtttgccgacaatgttgcttcggccgactacaacaacctctttaccggaaaggtcaatattggttttcttcaaaagctcaacaattccatgaggcgtgcaaggaagaaacgtatcttcgccaagcagcattttccctacgtttaacggatgaaaaccgtctacatctttatcaggggagatacgttcgatcaccgctttttcagaaatatggtctgggagcggaagctgaacgagaatgccatgaaactcagggtcttggttatattgatcaataatggaaagcagttcagcttctgtgaggctgctgtcaaattgatcgagcttgaaattcattcccattgtttctgccgcttttttctttcctcgcacgtaagagtgagaagcaggatcatctccaatcaaaataaccgccagtccgggagtgacgccttgctttttaagctcttctacctcttttgccaattgttcgcgtttttctctagccgtttcttttccgtcgatgattgttgcagtcattttctttcctcctatgattgttcaatatcagatttaatgttagaaagaaccccgtttacaaactttgtcgctttgtcatcaccaaaccgttttgccagctcaatcgcttcgttcatggagacattcaccggaatgtcttcggcatatgccatttcatatgctgccaggcgcaaaatcgcacggtcaacattggcaatccgatcgagcttccaattcaccagatgcttggagatcatttcatccagctggtcttggtgttccaataccccgtgtacaagctgttcaaagaaaggatctgttttttcttcatccagtgcgtgttctatggcttcattcactgcaatatcgctgacatcaatttgaaatagtgcctgcaaagctttttctcttgctgttcttcttttcattttctttctcctttgatcctctttatccgcttgtcgttaagccacaaagagatcataacatatttttttcgtatccgcatattgaaatcaaggtttttttaccctattaccgaatattttcacacaccttaatatgattattcggatttcacgttcatgaagaaactcggctatgtaagccggctttcttcatgctttgaaataaagggtaacgtgtaaaaaaaccaaagggccgccctccccttggtttcgtgttaagccatttacatttcttcgtcgatttggacttcttgggcttttgtgtcaaattgaatgccgacgatgtgaatattgatctcgttaatcgaaagagacgtcatatttaataaggtttgacgaatgttttcctgaacggatgctgcaactttcggaatcgaaacgccaaatgtaacgacacagtatacatcgatcgtaattccgtcatccgccaggtcgactttgacacctttgccatgattcactttgccaaagcgctcaacgacgcctgtcgcaaagtttccgcgcatttcggcaactccatcaacttctgatgctgcaatgccggcaatgacctcaatgacctccggtgcaatctcaaccttacccaaatgcgtatcttcgtgatccattttaagcaagctgttgtctttcattcaattcacctccgtaaaaattatgagcccattacatcatatgtttctaaaaatttcgtattaaactctccgctcacaaatgtttcgtgttcaagcagttttaaatggaaagggattgttgtctcaatgccttcgatgacgaattcgctcaatgcgcgcttcatgcgggcaatcgcttcatctctcgtttttccgtatgtgattacctttgcaatcatgctgtcatagtacggtgggatggaatagccagggtacgcagctgaatcgacacggacaccaagaccgccaggaggcaggtacattttaatttcaccaggtgacggcatgaaatttttgcttgggttttctgcgttgattcggcattcgatggcccagccttcaaattcaacatcttcttgcttgaggctcagttccattcctgaagccactttgatttgttccttgatcaggtcagttcccgtcaccatttctgtgactgggtgctccacctggattctcgtgttcatttccatgaagtaatagcgctgttcattgtagtcatagataaattcaactgttccagcacctgtatagccaaccgctttggcagcctttaccgctgcatctcccatttgctccctgatttctgaatcaagggcaggagatggtgattcttccaaaagcttttgcaggcgtctttggatcgagcagtcgcgttcgcccaaatggatcgtatttccgtagttatcagcaagcacttggatctcaacgtggcgaaaatcttctatgtatttttcgatgtatacacctggattcccaaatgcagttgccgcttcctgctgtgtaatcttaatgccattaatcagttcctcttcagtgcgggcaaccctaattccttttccgcctccgcctgcggtggcttttataattacaggatacccaatttcattagcaagcgaaaccgcttcttccacattttctataattccctgtgaacccggtacgattggcacgccggcctgtttcatcgtttcccgcgcaacgtcttttgttcccatttttgaaatggcgtcagcgctcgggccgacaaacgtgacattcacttcttcacataattcagcgaaatcagcattttcagctaaaaatccgtatcccggatgaatggcgtccgtgccagtcagctttgcaacactcacaatatttgtaacgtttaaatagctgtcttttgatgctttcggtccgatacaaaaagcttcatcggccatttgaacatgaagggcatctttatcagcttctgaataaacagcgacagtctcaattccgagctctctgcaggctctgatgattctgacagcaatttctcctctgttggcgatcaatagctttttaatcatgttcagtctccttactccgcttttacaagaaatagaggttgtccgtattcgaccagctggccgttttctactaatacttcaacgatttcgcctttcacttctgcttcgatttcgttgaaaagcttcatcgcttctacaatgcagacaactgtgttttcatttacttttgaaccggctgttacatacgggccagcttccggtgatgaagaagcataaaatgttcctaccattggtgaagtgattttatgcagattctcatcttgctttggtgcttcttgggcaggtgccgctgcttgctgcgcttgcggctgaactgcctgcggagcctgtgcttgtacaggtgctgccggtgcctgctgcatgacttgaaccgtgcctgcttcgtgttttttcagttttaaggatacaccttcattttcatatacgaattcgtcaattgtagactcgtcaattgctttaatcagctcgtggatttctttgatatttaacattcaatcgcactcctatgtatgaaatttctttttttataggttactactaaaagtacatactatgttcatcttacaggagcggacttttgaattcaactctaatatgacagcaacgcaaaaagcccgcttgtttagcgggcttttttccctcattcttatttagagggttcaaatgtgacagcgacatctttcattgttttgatttcttttgccacaaggtctataatggctgtcgccttcgatttagagtgtttgtctgatttgactgtaatattgattttatctccttcagcattaacaagcgcatcctcgtaaccttgtgttttaatcagcgtttccagctgtttttctgttccttccacttcactgagagccgtcattttatcgtatgcttcgcttttctccttggctgttgcatcatcgcttgacacaatggcattcagctcttctctttctttgcttctggcatcttctaaatcaagacggtacgttgtaaacaaatcatcatcggctgtttccgtaacaacagttcctttttcactggcttcagcggatgtttccttgtctgctgatgaatctttcgttccctttgttccatcttcttttcctttttcagtttctgtaccgcttttttccttcgtgtcttgcttggcaggcgctttttcagttgcgacctctccgctgtcagacgcgcttttttcactttgcatctgcacggcgtttttgctttccggcgacatgatatagtagacgcttaacaccacgacaagactgagcattgttaatagccaaacggtttgttttttaagcatttatgaatcctcctttatttttttaggggcaaccgcaacccggtggcttggaacatccaggacccgtgtcaccgcttcgataatggtttgttttatttgaacgttgtccactccttgagcaacaacgagtacaccgcgtatatcaggttttttcgtttggacgacgacaggtgtttctttatcgccgtttttgatcatgacgatttcttcctccgatgattggtctgtaacgcttctttttccgccttctttgtcagtttcttcagtggttgtatttttgtttgatttgtttttttcgtatactttcagcgacgttgcatctacattcacgacaaccgagacatcgtccacaccaatgattgtttcaagaatttctttcagttgattttcgtattctttttcatagtcatcgatcgagtctttaggtttatcagattttgaggctttaaacacttcggctgttttctctttgctgtctgcggaatgttgtgatgatacggccgttatcgttttggcgttttcagttttctcaggtgaagaaaacagctggctgacaagcataaaggaaactccgagaacaaaaacgaatagaaagtaatgatatttggtcagcttcggcttttcgccgtccttcgtttgtcccggaagaaactgctttttcaatacattccataatccgtttttattcattgccgacactctccccgccttccatatgaaccgtaattttctcacttccgatttcccaaatgtccgcgagctgcgtttgtatctgtttggcttctttttgttcggctgcttcttttgttacgtatgcatgatctgtatcaatgtggaccggcgcgaccgtttggaccgttttttcagaagacggggccatatacacgctgattgttttaatatcctcttctgaatctaccttttctcctgccgtgagtttgatgcggcctactttatattcatcatgactgaatctctcctccgctttcttttttagttggacagccatttcttctagaatatatgcgcgctgggaagcttgtatttctattttttttgaattgatttgattttttatgtcggcagactctgactgcccgttttttgtgaggtattcaaagatgacttcggggtctgtcttgaaaagtttaaaaatcggcgtaagcatgacgacaatcaagagcaggctgactaccatttttgcgtacttttgcatgctggagctcggcagcagcatatcaatcacaattgcaaataggataaacaacacgatggtggtaagccattccgttaaaaaactcatttgcctgcctccttcatttcatcatcatcgtgaggtttccggctgtgattatgacagtaaggcttaaaaaaaacatgagagacacaatggcgagagctgcaaaaatataaatgacgcttttgctgatgacgtcgaggcaggtgatgacgggcccgcctcctagcggctgaagaatcgcggctgccagcttataaataaaagcgagggaaagcactttgattgccggaaatgccgcaatacagatcaaaatagcgacaccgagaatccctaccgtatttttcagcagtaaagaggcgctgattactgtatctgttgcgtctgtaaacattcggccaagcacaggaataaaatttccggttataaatttagccgtcctgagcgtaatgccgtctgtcactgcagctgacgctccctgaacagagatgacgccgagaaagatggtaagaaaaacagccagtgctccgatggcgatatttctgagcaggttagccagctgcgttactttgtattgttcagtcatcgtgctgacaatgctcagaatcgctgataaaaaaatcagcggcatgacgatattctgaatcaagagaccgctcgtgttcatcaggaagaggataacaggatgaaagaaggcagcagatacagctccgcctgaggaagccaaaagcgccaagaggagcggaatgagcgccaggataaagctggtcatcgtctgaatcgcctcagttgcatagttaattgccacatgaaagctattaagcgcaaggataatcagcaccatgtacacaattgagtaagcgaccttactgacggtgctttgctgaaaagcattttgcaaaagctgcagaatgacgcaaaaaatcgtgagcaaaatcaatgtgcccagcagctttccgttggcaagcacttcatgaaacaaataagaaaagagagctttcagccattcttgcggtgagaatgatttatcgccattgataaactccattaagctgcctttttggctttccggcagcagtccgccgtattctgtcataatgtcattccaaaattccccgatcttatctgtttcaagcgaggctgctgtcctttccgctaattgctcggctgtttcagcatggtcttccgtttgttctgcattaccagctgcttgtacaatttctgcacggcctgctatgatcagcacggccaaaagcaaaacccattgaaagcgcttcaatctaccgcctcctttcggttatgacatagaaggtataagtccgagaatcgtttcgataatgacggttaaaataggcacagccattacgagtattaaaattttccccgccaattctattttcgaggcgatggctccttgaccggcatcttttgtgagctgtgccccgaattcagcaatataggcgattccgataatctttaaaatggtttcaacatagaccatgttgacatttgcattaatcgcaattttttctatcattcgaataatgtcgtagatttggtctaccaaataaagaaaaatggcacatccggcaaaaacgacgattaaaaacgcaaaagtcggcttttgttcttttacaattaaagaaaggaaggtggcgatcagccctaaacctacaatttgaacaatgtcaatctgcaagcccccctatccttggaataaaaacacagcttttatctttttaaataggtcatctacaatcgtggcgaccataaataaaatatagataaaacctaacagcgtcacccactgagcatattctttcttgcccatctgatccaatatcgtgtgtaaaaaagcgaccacgattcccactccggcgatttgaaatatgacattcacgtctactcccattttatttttgctcccctcacgtttacatcaatagaagaatgagtaacaagcccgctaaaaagcccaaactttttatcatcttttcgtttttcgcttgcgcctgctcagcatccgcttctgaggcttccaaatgtgtcagcgccagcttgatgtgcttttgctgagagattcgatcatgaatcccaagcgtctcgccaaactgcttcagcacttcgtattcgctttttttcaaagacagggtgtcccataccttctttaagctttgctcccacgccgttttcgcggaatcacttcccttgtccagctgatcactgaatgcggaaaaaagagttgaaacaggctgtgcgagctgtttggcaatctgctgtgaagcagtatgaagcggtgtatggccgtacatgatttcagcctcgagggattgaagcgccgcacgcagctggcggatttgccgcggccgttctgtataaatcttcgccatctcaaaacctgtccatgttgtcgctaccacaatgaatacagcgcccagcagcttcagcatgttttcacgcccgtcgtcctagacagcacatttccgtctttgtcataaatttggctcactgtgcccggcccttttgctcttgataattccaaatagcggtcaaaggctctttcttcccacaaacgcttcaatgaaggccgcttcatcaggtcggatatactccagccatgcgccgatacgattactgaaacaccggcatgcagcgcctccagaagtgcatctgtatcttccatacgcccgatttcatcgacaatcatcacctcagggctcatggatcgaatcatcatcatcagcccttcagcttttggacaggcgtctaacacgtcaattctctgaccaaattgatgctgcggaataccgcgaagacatccggcaatctctgaccgttcatcgacgatccctgtctttacgggcagcatgttttttttgccggtgcttgagagcctcgcaaggtcccggagaagtgttgttttgccggtttggggcggtccgataatcagcgtattcagccagctgttttgatataagtatggaagcagcggctccgcaatccccagcttttgccgggcaattcgtatattaaaagatgcgatgtcacggaggcctttcacacctccgttttccgtaatgactctgcccgccagtccgactctgtggccgcctctgatcgtgacataccctttcttcagctcttcttcaagtgtatacatactatagttgctgagccggctcaggatcagatgggcatcctcggccgtgcccgcataggacaaataaacaggttgtcctcttcgaatcaattcaacagggcggttgatccgaattctgacttcttcgatttccagccattgttgttccggtatttcagaaagggcgtttttcatggattcagggagaacctcagcgatttcattcaacagagcctcctcctttctaccgattggcttctttaaaatgtatgatgtgaggcagactttatgacaagcctctctttatttatgaacacccgccaaaatcaagacaacacccgtaaaaatcagaatcagctttgcatacgaaagctgcccggcaatttggtagattccgacagtcattgtaatgataaaaatcaacggaccgacaatagcgagaatgctgttaaccacaaccgccttccggacatcgttggtcacaagcatgacaattgctgccgtcagctcaatcatagaggataaaactcgtaatcccgccattgttaaaacagtagaattgatatttccaagtaaaaatttcatagcactctcccaacctcccatttttttatatgatatgctctagcttgctgaagtagtcttgtcattttcgtataaaagaaagattctgtttttgggcacaaaaaaagcctgctcccatttgggaacagacttctttttttctttctatgctcttgaaacgtaagaaccgtctgatgtattgacaacaagtgtgtcgccttcattcacaaagaacggcacgtttacaacaagcccggtttcagttttcgcaggttttgtaccgcctgacgctgtatcacctttaataccaggttcagtttcaacaactttcagctcaactgtgtttggaagttcgataccaagtgtttcatcctggtacatcatgatatgcacagacatgttttctagcaggtattttaattcttcttcgatttgagttgcgctcagttcaagctgctcataagaagaagtatccataaatacgtgctgatctccgtttgcatatagatattgcattgttttggtttcgatttgcgctttcgctactttttcaccagcgcggaatgttttttcctgaatcgcgccagtgcgaaggttgcggagtttagagcggacaaatgccgcaccttttccaggttttacgtgctggaagtcaacgacgcgccaaatgccgccatctacttcaattgttaatcctgtacggaaatcgttaactgaaatcatgtttaatgtcctcctatattccaatcacaaaataataagttcttttggggaatgggtgattgtccggttgccgttttctgtaatcacgatgtcatcttcaatgcggacaccgcctgtttctggtatgtaaatgcccggctccactgtgaccaccatacccggttcaaggatagctgaagatctgacggataatcccggcgattcatgaacttccatgccgagcccgtgcccggttgaatggccgaaatagtcaccgtagccttttgcagcaatatgatcccttgtgagggcgtcagcctcttttcctgtcattcccggcttaatatgtgcgacgccaagcgcctgagcatcaaatacaacctgatagatctccttcaattgatcactgggctgacctacagcgaccgtccgggtaatatcagaacaatatcctttataataagcgccaaaatcaagcgtaacaaggtctccgctttcaatcagtttgtcactggccacaccgtgcggaaggcttgaacgaaggcctgaggcgacaatcatatcaaaagaagagctgtctgctccctggcttctcatataaaactccagctcattggcaacagcgatttcagaaatgccgggtttcataaacgtcaagatatgtctgaaggcatcatctgcaatcttcgcagcttcctctaatatcttaatctcttcactagacttaatcaagcgcaacttttccacggattcagccacaggcactaattcggcatcactgataacggcgctgtatgaagcgtaagtgccatatgtcatgctgttctgttcaaagccgagacgcttgatgccaaacgattcaacagtgtcggcagtggtctgaatcaagctgccgccatgttcaatgatctcaaaaccctttacctgaaccttcgcctgctcagtataacgaaaatccgtaataaacgctgctttgtcacccgatataacagccaaacccgccgaacctgtaaaccctgtcatatagcgtacattagtgttgcttgtaatcagcatgccgtcaattcccagctgtccaaacaggtttcttaatttctctagcttcatcttgattctcccccttgctggcttaataagtagcgaacagcaagcttgtagccttcagctccaagaccgacaatctgccctttcgcaacaggagcgataaccgactgatgcctgaattcttccctggcgtataagtttgataaatgcacctctaccacaggaagactgatgcttgaaacagcatccctgatcgcatagctgtaatgactcagggcgccggggttcagaacaatcccgctgtattgctcctcagcctcatgtatcgcatctatcaaatcaccttcgtgattagactggaagaaagtgagctggatatgtaaggcttcagcaaactgaaaaagatctgtttcaatatcggtcagtgtctggcggccgaatacttcaggctcacgactcccaagccggttaacattcggtccgttcaaaatcaaaaaatgaggcacacaatctctccttttcgcgagggtttctcatgtaaaaaatgttcacttctcgtgaacattttatcatactggaaaaggattatacactattctctatgcattcccagcgcacgtgcaagcttttccgaattcagctcattgtattcaaatgaaatagaatacccgacaaacagcccgtaaagcaaataaatgcaaatggtcgtaataattgtatctgatgtcagttcggtcaccgtgcgcacatctggaaaaatcggattaaaaacaaaaaacacgagcagccaaagcaccaagccgtataaaatacccggccacattgtttttaaacgtttcaatagaagaaaataaagaaatgctgcgccaattgaaattactccaatcaaaatgatgctgattaccgttcccagcccatgttttttccactctccgagtacaaacggctgcaatatcatattcgggctgatttcggaaaaatgaaacaaatatgcgatataagcaacgaaactccaaagtacgcctccgcaaaaacctgttgccgccaccctgccggccattgaaacaggcggcttttgcttctcattcaattcttcattttgttctgtatctttttcgcttgtcatcatggcacctccagttaaagtgtgcccaaaaaatgaaatgtcaataaaaaagctcacactttttggcagctgcgagtaaaatttgaaaataacgggtataatgcatgtagaaaaagcaaggctatggcaattttttcagcctgtcaatctagaggtttagcgctgtttcctgtacaatagagtgaaaggaaatggttagcaatcctaaagaaataggcaggttgataatatgtcaaaacataaagttccgcccgcttacggcgggcaggctgttgtggaaggcgttatgtttggcggaaagcatcattacgttacagccatcagaagaacggatggaagcattgacttttttaagcttccacgcaaacacaacccgaaactgaacatcgtgaaaaagataccgtttttacgggggatcgcggccattatcgaagcgagtgcaaacggcacaaagcatttgaatttttcaagcgaacgttacgggctcgatccatctgaagacgagacacttgagcaggaagaaaaaaaatcctctgggctgtctatgtatctcagcctcgcagttataggcgtcctatcatttttgttcagtaaattcgtatttacattggttccagttttcttagcggaactgacaaggccgattttttccttgaacacagcgcaaatcgcgattgaaagcctgtttaagttgattttgctgctcggttacatctattttttgtccatgacaccgcttattaaaagagtgtttcaatatcatggagccgaacataaagtcataaactgttatgaacagaatttgccaattactgtggagaatgtccaaaaccaatctcggcttcattaccgctgcggatcaagctttattttatttacgattattgtcggcatgtttgtttatttactcgttccgacagatccgctttggctgcgtgttatagatcgtgtcgcactgataccggtcgtgcttggtatatcctttgaagttctgcagctgacaaacaaagtgcgtgacattcccggtctgaaattacttgggtacccgggactttggcttcagctgttaaccacaaaggaacctaaggatgaacaggttgaagttgccatcgaaagctttaacgaacttctcagactcgaagcattgtctgagcaaaatcagaagccttctcacaacgtcatctaaaatccgttgccctgctattactttcggaggtggacagttatgaatcatcgtgtacaacctattattgctgtattaattgcgctgggagcgttcggtttcctctatgtgctggtaaccaatcccggagaaatggcaaaaatggcggtaaccgtcatcgtggcaggtatcattatttattttattgtgaaatatgtaatgaatcgaaatgcgggcagcgaaggagcagccttcaaaaaagcggcgaaacaatcacggcgccggatgaaagaacaaaaagcaaaacaccgcgccggacataagggacgtgtcagccacctgcgaagcgttccgagcgccagcaagcctaagccgatgattctcaagaaaaaaagccagactcagctgactgttatagaagggaaaaaaaataaaaagaaaaacagagcgcttttttaataggtccactgctttaaaaacagctctgtccgtcttttacctagctcaatcagggctagttttttttgttgtgttaaatgaaaatcagtggccattacgtcatcaacagggagaaaaatgatattttgttcatagcgtgacgcaatgtgccttgcgtcatgagcatccttcatcgtttcaaacagggcgccgaacagttcaaaagcgttgcggatattttttttcggacgctctctttcacgcggcgcaagcgtgacaccgatcacagggcgctttctttcctttgaaaacagccagattggaaaattgcttaacacgcctccgtcgacaaccgtggcggtgcctgtgtccgtttttaattttatcggttcaaagaaatacggaatgctgcagctcattctgaccgctctggcaaccgggaacatatctggatttaacccgtaacgggccaaatcgtccggcaaaacaatcatggtgccgtttgtcagatcagaagcaataaggcgcagagaccctttctgcaaatcgccgaaaacccttatgcctttcgctcttaacagatcagcaatccatttttctatcgtatcgcctttgtataagccaagacgccagtagatggacacccactggagcatctttaaggggagaaatgagtacctctgatccagcaatttctctccgtccacttcttcaattaaagcgtggatttccttactggtgtaacctgacgcaatgaaagcggcaataatggcgccggcgcttgtacccgcaactcttttaaagcggaagcctttttcctcaagcacttcataagcgcctgcgagcgcaatgccttttactcctccgccggaaaacacaccgtcaatatacatctcattccctccccctccatccgatcgtttattaccattttaagaaaacacgcgaagaaatagaccaacgaatgacgggtggcgtcagcgtatcaaaaaagacggcctccttcgagaccgcctttttactgattatgatgttctgttttcttttggattgatttcagatcttttttacgggcatcatcttcttcaaaatattgaacaagatccccgatgcgatcaatactgttccagcttaaatgatgttcgattccttcgacatcgttatatattttctcttcatcaacaccaatgattcttaaaaactgctcaagcaattcatgtctgtataccagccgtttgcctatttttttccctttagacgttaacacgagaccgcgatatttttcataaattaaatattcgtctttatctagtttttgaaccatttttgttacagaggagggatggactgccaatgcttccgcgatatcggaaactcgtgcatatcctttttcttcaatcagcatataaatctgttcaatataatcttccatacttggtgttgtcatcgaaaccctcccaaaaagcaccttaactttataaaccattacaagtttacactaatgaacttgaaaaaacaaggatgctccgcgggtcaaaagccctgtttaccgcttataattccattcatctgaagcgtactttgtttcagccaagtgatgaacaaaatcaagctcttcctgagaaagttcatatggctccaaatgaatgttaagacctgtttcaaatccttctttaaaggctttacgagcctcatccatcgtcacccgcttttcgatgagttcattaatggcaaccgctttatttttgaaattgcgctgcatccgctctcttactctttcacttggatataagaacagatcgaacagcttgtcctcatctaaatcaagaagaatggagccatgctgaagaatcacacctttttgtctcgtttgcgcgcttcccgccaccttgcgcccctcaaccactagttcataccacgaaggcgcgtcaaaacaaacagatgaccgcggattttttaagctttctttttctttttcagttctcgggatggcaaagtaagcgtccagaccgagatttctaaagccttgaagtatgccttctgaaataacccggtaagcctcagtaacagtcgccggcatctcggggtgctcttccgaaacaattacgctgtatgtcagttcctgatcgtgcagcacacctctcccgccggtcgggcgtctgacgaatccgagattatatttatgtactgcttcaaaattgatttcctttttaatattttgaaaataccctacagaaagtgtcgccggattccagccgtaaaaacggataaccggggggattttcttttcgctgtgccaatataaaagcgcttcatcaagcgccatattgaatgcaggacttgcattgcctgagtctataaaccgccaagtttctttttgcattttaagaccttccttaccgttttaatagaatcagtttatcaaactgtcgggaaaatgaaaaatattttagttccattatagatgacaatcacgctgtgctttactataatagtatttgtcgaaaacggctctatgaccttgttttatgaagcagggttttgattttatatgctaaaggagtagaatcacattgtctaatatgatcgttttgattatttttgctgcatttatcatctatatgattgcttcatatgtctatcagcagcgaattatgaaaacacttaccgaagaagaattccgcgcgggttaccgcaaagcgcagcttattgatgttcgtgagccaaatgagtttgagggcggacatattttaggcgcccgcaacatcccgctttcccagctgaaacagagaaaaaatgagatccgtacggacaagcctgtttacctgtactgccaaaacagtgtccgcagcggacgcgcggcacaaaccctgcgcaaaaacggctgcactgagatttacaacctaaaaggcggctttaaaaaatggggcggaaagattaaagcgaagaaataaagcaaacagctgtctggtagacagctgtttttatttatctttcttccgcctcgtatctgagcactgggtgtctcgccgcttttgtttcatccattctttttacaatcgttgtatgcggggcctcctgaacaagctccggattctcctccgcttcttttgcgatttgaatcatagcatcaataaacgcgtccagtgtttcctttgattcggtctctgtcggctcgatcatgatgcattcttcaacattaagcgggaaataaatcgtcggcggatgatagccgaaatcaaggagccgttttgcaatatcaagcgtacgcactcccagctttttctgccgcttccctgataatacaaattcatgcttgcaatggcggtcaaacggaagatcgtaataaggcgcgagttttctcatcatataattggcgtttaacactgcgttctcagtaacagcctttaatccgtcaggccccatggagcgaatatacgtatacgctctcacattaatgccaaagttgccgtaatacggcttcacacggccgatcgcatgagggcggtcataatcaaacgtaaagcgcccttcttttttgactaaaactggctttggcaaataaggaatcagatcttgttttacgccgacagggcctgagccggggcctccgccgccatgagggcctgtgaatgttttatgcaggttgaggtgcaccacgtcaaatcccatatcaccaggtctcgccttgcttaaaacggcatttaaattagcgccgtcataatacagtttcccccccgcttggtgtacaatttccgccatctctgtaatctgctcctcaaacaagccgagcgtgttcggattcgtcagcataagagctgcagtttcttcattcactgctctttttaaatcctctaaatcaacaagccctttttcattcgatttcaccgtaacggtttcaaagcctgctactgttgctgatgcaggattcgtcccatgcgcggaatcagggacaatgaccttcgtccgcttgaaatccccgcgagcttcatgataggcacggatcatcatcagccccgtccattcgccgtgcgctccggcagcaggctgaagcgtaacctcatccattcccgttatttcttcaaggtgtttgcttaaatcatataaaagctctaatgcgccttgcaccgtgtcttcatcctgaagaggatgaatcgcagcaaaaccaggaatacgtgcgattttttcattgattttcggattatatttcatcgtgcaagaaccgagaggataaaaaccggaatccaccccgtgattgcgtttggacagcgctgtataatggcgcatgatgtccagctctgaaacctccggcagcgctgcgtcttcgtcacgaatataggtgtctgacaagaggtcccccaattcgatttccggtacatcgagctccggcagactatagccgattcggccttctcttgaaagttcaaaaataagtgcctggtcctgattactcatggcgatcccccaattcctgaatgagtgcgtcaatttcttcttttgttctcagctctgttacagcaatcagcatatggcagtccagctctggatacgtcaacccaagatcatatccgccaatcatgccttttgccagcaaacgcttgttcacagctctcaccggctcatccagtttgatgacaaattcattaaacatcggcccgtcaaacataacagtaaggcctgctttttttgcttcttgctttgcatagttggcttttaagagattttggcgggctatatcttttacgccgttttttccgagagcagtcatggccactgatgctgccagcgcatttaaagcttggttcgagcatatatttgatgttgctttatcccggcggatatgctgctccctggcttgcagggtaagcacaaagcctctttttccgttttcgtcttccgtttgtccgacgagacggcccggcacctttctcattaattttttagtaacggcaaaaaagccgcaatgcgggccgccgtatgctgaaggaatgccgaaaggctgcgcatcaccgacgacgatatcagactgaaacttgcccggcggagtgagaagacctagcgccagcgggttggctgaaacaataaacatggatttcccttgatgagcgataggctcaatatcctttagcggctcgatcctgccgaaaaaattcgggtactgaacgatcactgcggctgtgttctcgcaaacggtttggcgcaatgcatcaagatccgtaacgccatccgcagcgggtacttcaacaacatcaatatactgaccttttgcgtaagttttcagcacctctcgcgattcaggatgcacggtttttgacacaacaatttttttctttttcgtgtggcctgaagcaagcattgctgcttctgccaaggctgttccgccgtcatacatcgaggagttggcgatatccatgcctgtcagttcacagatcatcgtttggaattcaaaaatagcctggagctctccttgtgaaatctctggctgataaggcgtatatgcggtataaaactcagagcgcgaaatgacatgatccacaatgacaggctgatagtggtcatatacacccgctcctaagaaagaagcgtattgtacggtatcacgatttttagaggccagctttgtcagttctcttgttaattctgtctctgatttcgcttttttgatttgatgctcttttttatatttgacgttttccggtatatcagcaaataaatcatcgatgctgcttacgccgatagtagcaagcatctcctgtttatccttttctgttgcgggcaaataacggtgcttcatgtgttgtctcctctctccaagaaaaaatattagcgtttataaaatggtgttttgacaacctttgctttcactaattttttgcgtatctctacatctacaacagtcccgatctcactcgtttccgaatcaattaaggcaaggccgacgttttttcctaatgtcggtgactgcgtgccggttgtcacctttccgacagacttgccattttggaaaacctcatatccgtgccgcggtatccctttttcaatcatttcgagaccgacaagtttgcgcttcgctccgttttctttttgttcactcaatactgacttaccgaaaaagtcagactcctttttgtgctttacagcaaagcctatacctgcttcaatcggtgtaatatcccgggtcagctcctgaccgtagagcgggagcttcgcttcaaaccggagtgtatcacgtgcaccgagaccgcatggaatcaatccgtatgcatcccctgcatcgatgatttttttccaaatatgcatagcatcatcactgcggcagtaaatttcatacccgtcttctcccgtatagccagtgcgtgaaataagtgctttgcggccgctgatatcggcttcatcaataaacgcaaacggctttaatgcagacacatccgcatctgtcagattttttaagatcgcttctgctttcggtccctgtacagccaagagcgcgatttgatctgactgattgtcaatctgcacatcacctgctgcatgttctttcatccaagccaagtctttatctatattagaagcattaatgacaagcagatagcggttctctcctttttgatagataagcaaatcatcgacggttccgccatccgggtaacacatcgctgtatattgagcacggcctggcgttaacgcggaaacatcatttgtcatcaatctttgcaaaaaagacagactgtcgttccctgacacttcgacttctcccatatgagatacatcaaacaaaccggctgcagttcggacagcctcgtgttctttttttatagaagaaaattgaacaggaagctcccagcctccgaaatcaatcgtttttcctccatattccttatacaggtcaaataacggcgttcttttcagcatctaattcctcccctttatcaacggcgcagctaaaaaacatacaaaaaaggacagagaaacacctcatgtaaaatgaaggttctctgtcctggcacctgaaagtttactttgcatacgcaaagacgtcccctttggtggtttgcgcatccgcacaaacactctccagagttgcgtcgagcaagagttcttttgcctgagagattcactccgcagtttgctccttcggcgcctgtatcccgaggttttcggtcaggtctctccccttgctgtcattcgctcatattttcatgctgttatggacatactatagcaatatcttacatcaaatacatactcatatcctaccatcatcactatatgctgggcaacagcaatttgggcagatttttcttatattattcatcttaagaatcgaagaataagaaaggcggtttcaaagcaatgaatacagaaatgatctacgatgcaaaatggcctgaagaatttgctgaaagactgaaaaacgatggcccttgggcaaactgggaactgtacaagctctctgcagaaatccagaaaacattagcaattccagagtttgaaggcttacgggctcctttatatctgccttcctttacgccgctcccccaccagcttgaagtggcgcaaaaagtggttgaaaaaatgaacgggaaagcgattttagcagatgaggttggtctcggaaaaacggttgaagctggactgattctaaaagaatatatgattcgcgggttagcaaaaaaaattttgatccttgtgcccgcttcccttgtgtcacagtgggtcaaagagcttcaggaaaaatttttgattccggctgttgaacaaaagaaaagctatgtgtgggagcaatgcgatattgtcgtctcatcaatagacaccgcgaagcgctcgccccatcgagaaatcgttctgtctatcccatatgatcttgtcattattgatgaggcacacaaactgaaaaatagcaaaacgaagaactatgaatttgtccggaatctcgtaaaaaaatattgcctgcttcttaccgcgacgccaatccagaaccgtatcgaagagattttcaatttggtgtccttattaaaacccggccatttaggcagtcagaatcactttcaggaggagttcgccaagaagaaatccagtttagaagcgcatgaacatttaaaagatcttgtgaataaagtcatgatccgtaacaggcggcatgatacagggctgaattggaaacagcgccatgttgaaacagtgccgattcaattttctccatcagagcaggcgctttatgatgaaatttctcgtttgaaggacagtatcaataaaccagccagcatgttctcgattatgaccttgcaaagagaatgctgttcgagcagagaagcggtatatatgacgctgaaaaagatgcttgatcaaaaagagaaacaagcacctgccattgatgaggatacgatttcagttttgatagatcgcatcaatcaagtgacacaaaactctaaagcgcttcaagttgttgacttgatcaaaaagatcgacgataaggtcatcatttttacagaataccgcgcaacccagatttatctgcagtggtttcttcagcaaaacggcatcagttctgtgccgtttagaggcggatttaaacgtggaaaaaaagactggatgaaggatcttttccgcggaaaaatccaagtccttattgcaactgaagcaggcggtgagggaattaacctgcaattttgcaatcacatgatcaactatgacctgccatggaacccgatgcggcttgagcaaagaatcggaagaattcacagactcgggcaggagcgtgacgtgcatatttataacatggcgacaaaacatacggtggaagagcatattctaaagcttttatatgaaaaaattcatttgtttgaaaaagtggtcggtgaacttgatgatattttaacgaaaattcaagtgaacaattttgaagagcaccttcatgacattttgtatcactcagcaacagaagaagaaatgaaaataaaaatggataacttaacctcatttttgtcttataaaaaacagctgcctgctgaaaaaagaggatcttagcctgtaaggaggttttattagtgagacagcaagaggttcacgattttctgctgcgtttttttcaagcaaacagctgccaaatcgtcgatcaaggcttaggctatatgacagtgcagcttacagttgaaatggacaaacaaatcatgaaccgccctttctactggcattggcgcgagaagacaggcggtgatccgaatccaatgaaaatcacttttattacagataaagaaaatgcgccaaaagacctagatggtgaatttatatattttggggccccgcgtctttttcaaatattcaaagctgttaaacaaaatgggagatttaccagaatgtatgagaaaattgaatcagccggagctaaagtcccacttcagccttggcttggtataaatgtcacgatttcataccagtccgacatgaaaaaggataagttattgtcactaggtcttcacctagtctctggaacgataattgaagattttcaaagcaagctgacccagttttcactgacgtctcaaatatgtgactattgcttcaccatttcacctatgatcaaaccagaaagcggacttaagcgtatggaaaactatatttccaaatccgctatgcaggagccgtccgactgggcggaacaggcggttaacaggtggaagaatgatatgacattgcttgataagttttacgagcatatagaagaaaaaccagaagaataccatctagaaaaacaggcgctgaaaaccttgtatcaaccaaagatatcagttgaaattgaaaatggcggattgttttatctgcaaaataatatttcaagctaacttttttaccattcgacatcattctcgttttttttgagaaaatacgattataataaaggtatattggaaaaaaattctggtgatttaatggcaaatgacttccagagactaatgaagcatacaataagtcatggccggactggctgaaatacataaacaagtattttaggaggagaaactgcatgaagaatgcaaaacaagagcactttgaattggatcaagaatgggttgaattaatggtggaagccaaagaggcaaatatcagcccggaagaaatacgaaaatatttacttttaaacaaaaagtctgctcatcctggtccggcagccagaagtcataccgtaaatcctttctgaatgtgctataatatcacaaggaaggtgatgacattgattggccagcgtattaaacaataccgtaaagaaaaaggctactcactatcagaactagctgaaaaagctggggtagcgaagtcttatttaagctcaatagaacgaaatctacaaacgaacccctccattcaatttctcgaaaaagtctccgctgttctggacgtctcggttcatactttgctcgatgagaaacatgaaaccgaatacgatggtcaattagatagtgaatgggagaaattggttcgcgatgcgatgacatccggggtatcgaaaaaacaatttcgtgaatttttagattatcaaaaatggagaaaatcccaaaaagaggagtagtgcctgagcagaggcactaactcctcttttgtcaataaccatcgagacggcccagtatatgaatactgggccgtctcttttttttgctgttattaatttttatcctcgctatgcgctttttcattttctttcacgtaaccatctttatcagtatggtcctttttgattgtcaagccgttccactgtgtagcttcgaatgagaattgaagcttaatggagttgccttgatatttattttgaaccataagccctttttcatcttttgttttatcatccttgaattggatttccatttgaacctgatcgaagtcagttggtgtttttggaacaccatcatattcaggagcggttttaccatcaattgttgctacattgactttaccgcttgcatttaagaatttagggtcaatttgttttttgattttttcagcagccgctgcatcatttttagcagacatcaaatacaagtctttaaggttcgcatcatctaaaataatgtttttcgggtagccattgccgccctcttttccaactgtcaacaatgtcacttcaaactggctgaggaaatcttctggagatgtattgctgccgccgtttgctttaaaatctccataattaagcgccattagaacttctttgatcgcaagtgatccgttattttcaaattggaaatcctttgtcaacttatctcccggctttagatttgataagttcacactcgctgaattctctttagcagataaatcaagcgtacctgatgcaaaagtagcatcctttgatttaatgtcgttaaatgctgcccatgttcctcctccaactaaagctaatcctagtgctgcagaagcaactcctaaactcaatttctttttcatacccatggtaagctccccttttattgaatgattttatatcgaaacctgttgccaggtttacaactgaagttaagtagacatggtgctgtcctttgtatctgtttccaaggcttttgtctttctttcaatttctctaatggcgctgctgatcgtcacaaaagcgtaaactaacagcatcacgccgggaacaatcaataatacagccgttccaatcggctggctggcaaaatgaagcatatagccggcatatggaagctgaaaacctgtgtattgcgcgcgaacattttcgtccgatacaggcgctgaatcagctgctgcattattatcaccttttgttttaaataacaaatggtctccttgctttgttatgtcaacaattctgtgggtgaccgccgtatttgcatcctgcataaatgtaataacgtcacctttttggagctctttcacatcagtgatttctttgaccaatattaaggaacctgtattgaactccggctccatcgaacctgacagaactgatttcagcgtatacccaaacactgccggctctcccccggatgaacgtgttgaaatcacgacaagtgtcagcacaataataagagtaaagatgatcacgtataaaatattactgatcagcttcattgcttttttcatcctcttccccgctttccttctggtctgattgagtttctttttctttggttacagcttcttgagatgtttcttctttcattgttttttccggtatatctttttgtgttgtttcattctcctttttgacgtccgactttgtttcttttttagggactgtcggtttttcatcgcattttgcaagcctcataggctccgaccactcaaatgtactgccgtttgccgggtagcctgccggtttatatactttaaatgcataaatgccgggtttcatttttttcttggtctcaattttataaagtgaatcgccgatttgattggagacaaatcctttttcgatcacgttcccatcctttaacggtttgcgggcattttcaagcttatgaagctcccacttccactttgatttcttaagtttctcacctgtattttcgagcacagcaaataaggcgaaaggtgagcatacagtgcctttcgtatccgtttgatctgatatgtgcaaatcactttgatcccagcgtttatcataatggcagtttttatctgtatgctgaaagtctttacacgtttgaagtgagacatcaaatgtttcaatatcatgaaaagcagcgcttgtatcatcggaaaattgtaagcatattgcggcagtcagactgaaaatgactgaaagctgaaagataagcagaactttcagtttcgtcttcgccttttgctgattgtgaaacaatcgaaacatatcttacctcctgtaaaacactgtaacttgatatgacaatcgttctctttaaagaacttcacaaatagagtataatcaacgatttatagatttaaaaacaccgaaatcgctcattttgttcgtttaaaagaatgttttcatcatattacaaagtcttgctcagtattgctcattttttcaattttttagaaatttttgggattgttatgtgagaatttaaatgcatatcccattattatttggtaataataaacaaagaaagggtgacagcatgatgatcaaacaatgtgtgatttgtctatctcttctcgtctttggcaccacagccgctcacgcagaagaaacaccgcttgtaaccgcccgccacatgtccaaatgggaagagattgctgtaaaagaagcaaaaaaaaggtacccgctcgcacaggtactgttcaaacaaaaagtatgggaccgtaaaagaaaagatgaagcagtgaagcaataccatttaactctgagggaagggtcaaaagaattcggcgtttttgtgacgatttcatttgatccttatagccaaaaggtcaataaaattgccatattagaagaatatcaataaggtcctccattttttgaaggaccttattcgtttatttgcggttattttttccgtttcagccaaagtcggaagccatagggtaaaataccgaaccactgctgggaaacaggcgtttttgtttctttccgcacctcttttcgttcttttcgctcatctctcggagtatctatatatttgacaaattgctgcgtcatatatttaacataatcattcgttttcacgtgatcacctcatcattcaattattatgagtgttgtctcacatgactttttttataccctttacactgttttattctgtccatctcagcagttttttctgtttttggtcaaacacgatctgtgcagttctttctgttcccgaatccgttgacactcttaagttgatttctttttgttcttttatcgatgtatcatgaatgtaataagaaacccgtccatatagaaattgctgcgtaccctcctggcctttccgttcctctagaacatgccgaatcgaaagaagcaccccattttgaagcaaattctctcctatgtataactcttttgtttccttctcaaacatgcagcgtgaaatatattgagcagcaacaaagttcacgattaacagcacaagcgctgacacaaaaagaacagctggataaataaaccctcttgtacgatacattcacccccctcctaaatacgaatagactggaaaagcagtttgatacactttttggtcttcactctcaattttcagcaaaacaacaccattttcaatatcagctttcatggcagtaatatgatctaaaatcggaacatgccctttgccatccactctttttcttatcattgaatgataaatgtcaaaacggatgtcttgtccggaaagattggtgcagattaacacgctcccatgctcggctgtcttaactgcctgtgattccttgcattcattcatcatctgttctatcgaaatcatccattcctgctgtgtgaaaccgtcatgttcctgctgtcgagacaaaaacagatggataatcgcagctaacgatcctgatatgagcaaaaagactgagagcgaaaataatacgttaagaagcgtgtagccattctgtctgcaaaatgctgaggcaaaatgatttttctttataagctgcggctttgatacatacgttttgatattcgccctcctcctcccacttcattgcatagatatgattgttctttgtaatcgtttttgacgcggctccttcaccactcatgacatatttgctaatgctctcattcatcatctgatagccaatttctcgtgattccgccattttttcatcagccatcagcttgtcccacaaggggacgactgtcagcagcacaaacagccacaggcttagcgcagacattgtttctattgtagaaaaacctttattttctctccacattgactctcccgctccctagataaactgttatgtcataaacggcatggccttttactcgtatttttccgcctgcattcgggtgccctttctcattaaattccaaacggtcttttaatgtcagcagttctatagaaagtcccgttgcatacggacgttcaataaccgtatcaccaatgactaattgatattcttttttatgaaagagaatttttgttctttgttgacgggaaatagcagtctgctgtgtgagcataatatcatttttcagctgacttgctgcctgtcggacagctgtattgtcataagcaggaggaagtgtagtgaagacggccaccaggaggatagaggcaaggcttaacacaagcaaactttctaaaagggtaaaccccttctcctcgtttaatttaatgttcaaccttaacttctccgccggtgatgataatgcgcttaccatttggacagacagcatcctttttcacatagccctctgactgtaaatcggcaaggctcggagtttgtccttcatgatcaagctcaaatgcagtcatttgtgccttaaccatgttttgtaagccttcacagccctttttttgaatggtttgattatgtttcgtgacgttcggtatcgtaattaaaagcaaaatcgaaataataaagagcacgattaacatttcaacaagtgtaaatcctttctcattcatcagcctcttcctttcacatttgattcatcatctgatacataggcacaagcatagataaatacacaagtaagatcatcgctgcaacaaatccataaatcattggctgaaggatgcctgtccatttttgcgctttgtgttccagccgctgtaatatgaattggctgtatgtgaaaagctcccgatccaatcggccgctcagctggccgtgagatatgacttttgataaatcagtttcataaaaaaggcttccacaaatagcggattcaattgactcaccggcttttagccgttcaatcaattgttcagcctcgcagcggtagaaagggagaaacgtttgatgtttaaatgcattaaggctgtcataaattgagaggcctgattttaaaaggctgcttagctgcaaagaaaaaaagtagctgttaaacagctttacaagctttccaaccaaaggaatcctgatacaaatcagcatttgccgggcaggtgattttttcttaaacacaagccaataataaatcccgatacctgctgtaaaaagaacaagcaaaatgatcacaagatcaatatgctgaaaaaaagcaaaaagcatatcggttgaacgtgaggtttccatattcatcgattgatagataccggaaaactgaggaatgatgatggactgtaacatataaaacatgacagcgaccgtaaagatgaggaaaagcggatagcgcagcactcttttcagctggtctgcctgtgcaatttttcgttccagcagctctccgctctggatcattgaagcaggcagttcaccatgtgtttcagcaaaataacaaatacctacggcttccttatgaaatgacaaactctttagtacttgataaaacggagccccttccctcaaacaagtgaccgaatcagtcaagtcagccgcctgcctcttattcatctgaagttccatcaggcgtaatccatccagaagtgtatatccgcccgcagtcatttcaccgagcctctttaataacctggcttgatcctttaacaaccagacttttctaatctttttcatgataaacccaccggtcatagttgtttgtcgttaaatagccgagcgcaattccttttctgataatttgacgaagcgtttgatattggtaatttgcatgatttccttttgcctcctggatacattgctgaagatttttcccgtatagaagctcataaacgctagctctcctagtatttcgtgactgtcggcaatacactgatgaacatccgttttcacaaaacgggcaagccaaatcaaccaagcgctgagccgctattgcaatgacagtctgttcgatttcattcatattgataccgaattcaagcagtctgtaaattgcgccctttgcgtctctcgtatgaaggctcgttagtaccagatgtcccgtcatcgctgcccgcaccgcaatttcagctgtttccgcgtctctgatctcacctaaaataatcatatcggggtcatggcgcaaaattgctttcagacctgcggaataagttacaccggctttttcattcacctgaacctgaagaacatcttcgtcccttgtttcaacagggtcctctaatgtgacaatatttcgattaaagtgtttttttgcatattgaacgagagagtataatgtggtagtcttccctgaaccagtcggcccggtaaaaatgagcatgccatgggaatgttttaaaaacgagagtaatgtggctcctgtcttcggaaatagcgacaatttatcaatcgaagggatattgtattggggcatcactctgatcacgaggctttcttcattaattgtgggcagcgttgacattcttaaatgaacatttccctctttcaactttaacgtaagcgaaccgttttgcggctttcgcctttcacctatatccattgctgaaagaaatttaaaatgtgaaatcagtcttacgcactcttcttttttcatgtccctttttttcagcaaggcatgatcgacccgaaaatgaatgatagcgtcccgctccctcggcacaatgtgaatatcagaagcctttgttagatatgcctcttcaatcaagtttttgcttaccttttctattgaatccaatttgattccctctcctttcaacgcatattgtagaaaaagaagaaaaggtaatcaaacagggaaaacgtgattttgtgagatgttatatgctgaaaaaccaattctttctggcaagaaaaaagactttcaactgaatgtacccctgtcattataattttccctataaataaaaaagcagacatggtcaccatgcctgctagattccattttcattatgctgttttcgcttattgaccagtatctttctcaacggaaagatcgcctaatgcaacaataccggtcatttggtcattttcaagaatcgataaactgcggatttaatgctctgtcataagccccttgacatcgtatccggtcaccctgatatgtctggtgaaaaagcggggcacgctgcacaaaatatgaaacatcctatagagtccgcctttttcgaggtttctttttcttcttccgctcctgcagcatatctcccgtccagcctttttttctcaaatagagatagatcagaactgtagatgtgacaatcaataagagggaaaagagatatccgtatttccaattcagttccggcatcactgaaaagttcatcccccataaggcacccagagctgtaatcggagtaaaaagcgtcgtgaaaatggtcagcgcttttacaatttcattccccctatgtgaggtaatgacttcctctgaatgcagcagattgttaagctccccttcaaattcgctgatgtatgtaaatcccctgtcaatcttcagttgtgtccgctgataatcctttttcccttcattttgaggtaaaaaggtttctttcaacgccatttcaatttttttagcgcttaatatcaaatttttccaaatcatcagttcatggcgcaggagatggacgcggtttaaaatgcttttgctattgtcgtctttaatttgccatctgagctttctcagcttgacttcaaattcatcaacaccgattaaatacgcattcattagttcgccgagaagaattaaaaacccctctatcgcattgtccgctctttccatttgccgaacaacttctttgcctttaatctctctcaaaattgaaaagtcaaagttgattgtaaaaaaatattgtctggtgatataaaagtgaaaaacagtatggtctttttcttcaccaagcccctgatcataaacaatcgacccaaatactgcttcattttccgtttcagttgtatctactcgcaaaaaattaacgtgatggttattttcaaaccacttttcacactgaggccagtgagaaaaatggattagatctcttgccttacttctttcttgaggccccatttggtaccaaaaccaatcctttcccgtatgtgccttcatgtcaagctcctccaaacttttgttctttattctttaattgcccaataaccgcgtcactaaaccagtctgccgcttcaacacatgttttatgagcattttcaggtggtatggaatgtagaaagacatcggaaaagggaggtgcatgccttccttggagaaggcagttgttttggaatttatcaatttactagcagtcgctattctcattttgttaacaggatttttcgttgccgtagaattttcaatcgtaaaagtgcggcgatccaaaattgatcagcttgtcgcaaaaggaaagaaaggtgctaaagcggcaaagcatgtcatcactcaccttgatgaatatttatcagcctgtcagctgggcatcacagtcgcagctttaggactgggatggcttggggaaccgactgtgcaaactctgcttcgaccgctttttcataaagcaggcttaaatgaatcgcttacccacctgctttcactcgtcatcgcatttttagtggttacgtatttaaatgtcgttattggggagctggcgccaaagagtttcgccattcaaaaagcagaaagcattaccttgttgttcgctaaaccgcttatttggttttataagatcatgtttccattcatttggctgttgaaccactctgcccgattgattacaggagtgtttgggctgaagccggcatcagagcatgagctggcttatacagaggaagaacttcgggtcctattggctgaaagctataaaagcggcgagatcagaaaaagtgaattaaagtacatgaataatatcttcacctttgataaacgaatggcaaaggaaattatggtgccgcgaaatgaaatggttagtttgtcactagatgaagactccatttcaaatcttcaggaaacagtcaagcaaacaaaatatacacggtacccggttgtaagagaggataaagataacgtcattggcgtgattaatatgaaagaagtgctgttttccatgctgacgaaagatttttcaatcaagaagcatcaaattgaacctttcgtacagcccgttatccatgtaattgagacgattcctatttataaactattgctgaaaatgcaaaaggaacgcactcatatggcgatcctcatagatgaatatggcgggacgtccggtttggtcactgtcgaggatattatcgaagaaattgtaggagaaatccgtgatgaatttgatgcggatgaagtgcctcatatccgcgaacttggaaaggatcattacttgttaaatgcaaaattattaatcagcgatgttaacagcctgcttggaaccgatttatcagaggctgaagtagacaccttgggcggctggtttttgacacaaaacatagacgctgagcctgaaagtgccatagaatatgatggctactcttttaaggtaaaagacatcaacagccatcacattttatttatagaagttaaaaaagctgaatagcccgtgaaaggctgttcagctgctatctttcaagataaacatggcaaaggcatcaacactcttttattttaaaccctttattggccagggctttagcaagactttgctctgttttcacattcgaaaaatccagacccagcttcacgacagtttgggcaatttccggcctgattcctgaaataatagtctcaatgccgagcaatttggtgctgtcaatcactttaaaaatttgataggctaccatggtatcaacgataggaacgcccgaaatatctaaaaataaatacgagagctttaacgctgagcactgctccagcacagactccaaaatcgtcctcgctctgtgcgtatcaatttcaccgacaagcggaagaatcccaattccatcagtaatcggcataatcggcgcactcaattcattaatcatttctttttgcgcgtttaattgtatcatggtcacctggtgatattcttccgtaaacacttcgatgatctcatcaatgttttgattcaagatccggctccactcataaaattcctgaatgctgatgtcttgagaagaagcttcgctgaatttatgaatccattcaaacatgatgtgcctgaaagtgttaaactggccgacactttgtgtaaccgtcacttcatgaacggcacggtctctggcgcattgaagagaccaccggttgagctcatcctctacgtcttcttttctaagggattttgctacgatggtcaccaataattcatgctggtcttttaacttttgttctagtttttgctgatctttcgctgaatacagccagctgccgtttgacgtacaaacttccagccattgttgcgtaatatcttttttgtgctctgttaagtgctgatcaagagctatcatcttaatgagttacctcctgtttttgaaaaatgtacgctatatatgtataacgcgtctgcctttacacatactatgtttagattcaatgggctatagccaagcggtaaggcaatggactttgactccgtgatcgttggttcgaatccagctagcccagtttctgaacaggtgaaaaaccgaagataagctgattcgtataaatcagcggatcttcggtttttcatcatgcagattgatgaaccgttttcttcttcgataacttcaacagttctcccgggttataaccaatcaccagctttttgttgtctactagaatcgggcgtcgcaaaagcttcggcttctcgattaaaagttccagcacctcatttaccgtcatttcttcaatgtttaaatttaaatttttgaaagtctggcttcttgtcgccaaaatttcatcaattccttctgtcgttaacgataaaatgtactttaattcttctcttgtcggggtttctctgaataagtgccgttcgttaaattcaatttgatgtgctttaagccaatgttttgtttttcggcatgacgtgcagcttggatatgagtaaaaagttaattgttgttccattcgttttttcctcctcagttaaccatctctttgtagaataactacccggatcatttttcatttaaaccatttacagaacttttttcggattattttttaaaaaacattcatacaatagaaaacacaatcaaagggacaaattccatttgtatattaataatgaaaatgtttacatttctaggtgtgatctattataataacagtcagagggactctcgggaggggataaaaatgaatcgcatgttccgggtgttaggattttggacgggaatttttgcagtcatgttttatttaggtgatatgaaagatgcttcccttttattttttggacagacgatcttatttgtgtttctatcgtatttgaacttaaccgaacgcatgtatatttatatttttggcgcttatttaacaattttcttcgccggctttacatattactcaatttttattatggtgcccggcggcggaggccattaaatgcagaaagagacaaaccttatcggtttgtctctttttttacaatgaaaacccatttaaaaacggattttgatcctgctcagtcagtacgtctgtttcaggtccatggccgcttaacaccagcgtgtgttccggaagcgtaagcagtttttcatgaatggacgtcagcagcgtctcttgattgccgcctattaaatccgtacgtcctataccgccttggaacaagacatctccggaaatgaccaagtctgcatctttcacgtagtaagacacactgcctggtgaatgtcccggcgtaaataatgtttccaaatgaaacggcccgatattcaactcaccgtcgccttcaattagatgatctgcaggcttagctgtgacttctatccctcgcagcatgccggagccgtttaaagaagcgtccgcaagccaatttttttcattttgatgcaggtaaacagggatatcccatttttctctcacttcatcaagcgccccaatatggtcaaaatgggcatgtgtaagcaaaatggctaaaggcgtcagccctttttcttttatgtattgattgattttatgtccctcgccgcccggatcaaaaatcagacattgatcatcactgatgagaaaatatgcgttcgcttgaatcggccctactggcattcgtctccatttcactattatcacctctttcttttttatgctcttattatgagggtttttgaaaaaagattcaaacaatcgcaatgaaaacgctatcgacaaacctataaaaaacaggtagaataaaactggaaagaattgcaggtttttcaatgtaaagggggctgtgttatgttacttgtcgtgattttcggccttgtcgctcttttcgctttatggggagtcttgcgttctgttagaaataaaaatatactcgggtttttattagccggtgccaccttatttgtctttggatggtttaccgtgatgaccgtaataaacagcgggtatccaaccgcacattaaaacctgtatccgatcggatacaggtttatttttatggctgtaaatgtttattgacactttctattttgctctcaagcgtcgtttttttgtcacgcctgtcatcgatacggatattcgttgccactctgtgcaatcctttttgaaatggcgcttcgtgaattgcctgaataactgcaaaaaggtcactgagttctccctcgatcagcgtattcatcggtgtcagctgatatttgattttcccttctgcttgatatccttctaatatcttttgcacatcggctacgtaagcactgacactgggtgtttccgtaccgattgggataatggttacatctgcgatagccatcgttattccatctccttttgatcaatgatgagttgcttcgtttcatgtgatttcaataaaataatttgctcaaaatgaaagccgtataacgcatatttcccgttcggagatatttgaatcggctccatttcccgcagagacacaagatcttttgtctctcccgatgctacattgattgctgcgagcttatatgcatcgccgctttgtttgaatgtataaaacaggcctcctgcttcatcatagtcatactccattggagccaaacttgtatatttcgcttggagcggccatttcgctgtaacaggtgatgttgattgcggcgttttaaactgatacgtcccttttcctccggaagctgatttgacagtaaaactcatttgatggaaagaatcgaagaatagaacgttatcctcaagcttctgttccgtcttagaagctgtatcgaacgtatataaaggccctgttttatcgtctctaccctcttttacataatcaaatgtatttttggatgtccaatgaatgaacggaacctgtactgggcttaagaaagattcgtcttttttagcattcacctgatatgtatggaaatcccagttttcattgaattccgtcaccatcatttgataaggatcatactgattccaagcagcttcaagctcatacgtttcgtaatctttttcgtaaagcgtctctccttctgcattaagcaaaaccactgccgtcttttggctatgtgtgatttgcagcagaatcatctgctccctcgcattgatttgaacatcaacgatttgaccatccgtttgatagagctttttcgctttgcctgtaaagatgcggtacgcaaaaagctctgttttcgtcggattagacgcagtatataatattgtgctgttattcagccagccttccgccccatccgctttttccgcggaaagcggtatgatgtcttttttctcatcttttgccgccgatgcctgtttttgctgctgatgagatggttcgcatgccgataaactaaacagcaataccgccagcagaataaaacaaactgatctcatcagcattcccctccgatcatctttattctctcatatttgcttcggcagaaaaaagaaaaagtttcagttactcatgaaaaaataacgccctccacaagataccgcttgtggcgttatatatgtgtgaaaactgctgaaacggcaaaggattttggccttttccaagttccaccgtatacccttccttaaaataatggtgaataaaccaatcacgaaatccagcatagctgtctatatcccttactcccttataaatgttcccgcttaactcctcaaactcctttatgacggcagcagattcctcaggctcaaggcctttatagccccaataaatttcttctccttgagtatgaagagccagcagtctgtcaggcggattctccgtgatcagccggtacatcgcaatagattccggctccgtaagcggagagattcccggaaaatcgcggtagctgggtgctgtcggttttcggtatttttcaatttcccataatgatggaaattgtttatttaaatcaaccccgtttatattcgccttccattcattaaaatttggacgatgttcatttagcctttcgagttcatctcttctggctcccatgacttctgatccgtttaaaacaagatcaacgccatccggattgacaagaggaacgagggataaggatgtgctgttaaacagctttatgggagaaaagccaaagaaaggcgaattgcagcataatgacatacagtattccttaaaccattttagcaggacagacgttgtaatccactcattcgcatgaaatgacgcgttcatatggaccttttttacggcatgctccccaccagccttcagctcccagataggcctgccgagtacagaacggccaatttcccggcatgagacaaacggaaaaacatcaataatcttctttatttccttttcaacagctgaatcatcatagattttctcttgctcaatccagctatctgaaagtttcagctgccgaggctgtaaaaagcgctttatgtcctgaatggtttgaagctctttgccgctatgctcctctatcacataaccagggcaatacaattgatgtttttgtgcggagcgatttgcacttttaagcaattcctcgtctatcttcagttctttcgccacattggccaaattgttcttgatctcaggtttcaccgtaataaacgccatcatcatcccccttttttgttactatatgacagcgtatttaaaaaaagaaagcctcccgctcacttcgatgcgggagacattgtgattatgatgcctgatcaagcatttgtttttctttccgctttgacgaattgtccagccttttctggtcataaaatcgcaacaaatccccataaatgatttcatcagaaagtgatagctcctgttttgctttatcagcaaatgcttcacattgttttgtctcttctaacggttttcccgtctctttgtcataacacgcaccgtctgtataaacaacctgatctgtgataaagctcccgtcccggagcaccgtgaagtccagtttttcgtctgaaagcagatcgttgccgaattgaatttgatctttcgtatcaatccctaaaagattcatcagcgtcggcctgatatcaatctgcccgcctactgtttcaatggtttgcggctttttatcagtaatacccggaatatgaatgaccagcggcactttttggagctgtacctcttcaaatggggttatttcttttcctaaaaactgccccatcgcttcattatggttttctgatataccataatggtcaccatataatacaataacagagttgtcgtataacccgtcttccttcagcttttcgataaaccgtttcagcgcctcatcctgataacgcactgtcggaaaatatttatttagcgtctggctgtttgaatcatattcatcaatcaattgatcctcttcatcaagatcaaacgggaagtggttcgtcagtgtaatcagcctcgagtaaaacggctgaggcagatttttcatcagctctgaggactgctcaaaaaattctttatccttaagtccccagccgactgaattttcgtcagttacatcatacgagttaatatcaaaaaacgaatcatatccaaatgagtcgtacattaaatcacgattccaaaagctcttattattagcgtggagcaccgctgaatagtatccgctgtttttcaaaatttcaggagcggccatatattgattgcccgcattcgtaaaaaatacggcacctcgtccaagcggatacagtgaattgtccacgataaattcagaatccgaggttttcccctggcctgtttggtggtaaacattattaaagttgtagctctgttttataaagtcattcagaaaaggcgtgatttcttctccattcaatttttcattaatcacgaagctttgcgtcgactctaaggatacgagaatgacgttccttccttttgcagcgccgaataagcgtttgttggcatccttcgcattagcggttacgtagttttcaatctccgtcaggctgttgctgtctgccaacgctctctgtgcggattgctttgactgaagaacgccatcgtaaatatgaaaattaaacaggctaatgtttttaacaagcatttctctgtcaaatgagcgtgtcaatagctgaggtctttccgcctcagacaagcccaggttgaagaaataaacagaagcaacgaacaaaaaataagccgcccgttcatttttcgttgagggaatgtccgattgaaaagctttttgccggatgtgaagccatattaaaaccgcaatatctacagctaataggaggtctgtcggctcaagaagtgttccgatgctgcttccgagatcacccatattgctcgtttgaaaaagaacagggattgttaagaaatcattgtaaaaacggtaaaaaaccatatttgccagcaatacaaacgtgacaagacagctcatcgcgataatgtagcgatttctgtttttgccttttaaaaacaggctgaggccaaaaataagcaacaaaaaactcaatgggttgataaacagaataaattcctgtgttagattgtcgattttaatatgaaaactggttttgtaaacagcatacgttttcagccacatcaataaaatggcaatcagcataaatgaaatcttcgaaaaaaacgtttttcgcatttcaacctcctatgcagcacgctcaaaaaaatcagtctattcccaacattctcattaacacatcaaattaaatcttaacctgagcacaacaaaaaatcaatttcatttacacaattttaacaattttgatgtttcagccattcatttttagcgatccaagcgcctccgataacgccggcatcatttccaagtgctgcgattgaaatatcagcagcttgggctgcccgcggaaacgcgcatttgcggaatgttttctcgacttttgatctcagcagttctccggctctcgatacgccgccgccaagaacgattttggatggattaagcgagcttgccaaatttccgagcaccaaaccaagatgcttggctacataatcaaccacctcaagggcaatttcatcattttcacccgccgcttcaaacacatctcgcgctgacaattgttcggttgcttttaaacgtgtcgtctttttagcatttgctattttttcttttgcaattcttacaattccggttgctgacgcaattgtttcgatacagcccgttttgccgcagttgcagggcgctccgccttcagggatgctgcaaatatggccgatttctccgccggcgccatttataccatgtacaatttcaccatttgcaatgatgccgccgccaactcctgtgccaagcgtcacgagaatgacgtcttttgcgccatcacccgctcccttccacatttccccgagcgcagcaatattcgcgtcattttctataacagctgggatgccggtttctgtctccagatggtttttcaaagcataatttttccaccctagatttactgtttcataaaccactcctgccgccatatctacagggcctggtgcacccattccgatgtatttgatgatgtgcttcggtttttgcagctcatccagcttgctgtcgattgtttttgcaattgtgacagtaatcgtgtcgccggttttatctgtcggaacttcccacttatgctgaatttcgccatattgattaataaaagcgagtttaatcgtcgttcctcccaggtcaatgcccgcaaaccatatctcgtccatttttatcaccttagcctttataaaaatctcttccgttttttgtttgttccaattcttttcgaaggacagctgccgctctggcccactgctccttttcaatcatgtggttcatgtataattcctttaattcatccagcataaactcaatttcaagctctctgtctccaaaataaacaatgtggccaaacgtttttaacagctgctgcacatcataaaatgtattcattttcctcaccatttcttgaacttaactatcataagcgtattcataaggaagcggtcagtcaagaagaaaacgctgacaaaaaagccagcttcctttccatattccacctctatgattctttattgttttcaatttgccgctgcagctccttgtagcgctgctccttcggcttcagtttcacagccgtctggatggccttttctgcttgtgcaagctcatttttttccgcatacaataacgctaaattgtaataggaagcatggtctttaggttcttttttcactgctcgttccaaaagggaaaccgcctgatcatattcgccgatttgaatatcagaaacagcaagaattttcaaaagatcggcagaggcatctttttgcgctgcttctccgttcagcaattctgttacttcttcatactttccttcctgatacagctcgcttgcctgctgaatcagcgctgactcctggtgtgaaggcgaatgcaatccgtaatataaaaatccaacagccaaagcaatcagcaaaaccgctgacaacaatctttttccaaaggctccggctttaggcaaccccagtgctgctgcagcgaaaaagccgccaatcaagccgccgatatgtcctgaattatcaatattcgaaaccgcaaaaccaaagcccagattgatgataataatgacaataatattggttcctatagttcttaaaaacatttttcgattagacaaagcaacatacagtaatgcacctaagcatccgaatatggctcctgatgcccctgccgaaggatacgggctgaacacaaaactcgcaatcgaacccgtaatgccagcagccagataaatcagcaaaaatctccccgatccatacatccgctcaaccgctgtaccaaccgaccataaagccagcgtattaaaagctaaatgcgctatgccgatgtgaagcacgatcggtgtcagaagccgccaccattctccttgtgcaatcaggctgttttcttttgctccaaaagccaccagtgtctccgtattagtgctgcctccgtttatttcgagcaagaaaaacatcaggatctgaagcgcaataaataaatatgtaaaagtcggttttccgttttgaaaaaccgccgcttcagtttttctctgttcttcttgtttcagcactagcgaaaggaagcgttctcgcgccatttgcgcgttttcaaacgaagcgtgttcctctgaacaatcttctgtacgaaatgatggaaaaaccgcttgaagatcatctcgaagcatcgttcctctaacgatcgccggctcaactgacacagttcccttctcaaaagttttttttgcaatctcttcccagtcatcaactggggcttccgttgaaaaaaacacgttcagcagcttcatccttcgtctgcccaattgatgtctgactcgttctactcgttcggcctgctcttcgatgtctctaaccatttcttgacggaaatcaagatcgtgcttataaagacgaactagatcatgagaggacttgtccggcgcttccagccatatttcatctgactcaccggcttgtatgacgccatacccgctattcaccaggtgcgccgcaattttccaatatgtatactccagcaaaaacatgtttaccgctccaatagttttttttcattataacagctggcgctccgaaacgcctactgaaagcaaaaaatcccgtttttcacgggattttagaaagcttgctgtataaacttattgcggataaatggaattcttaaaaacaaatggataaaagaccgcctgattcctggctggctgagtacagtattcataagacggtagcgattttgataaaacatgacggcagaaaccgcgaaaatggcatatatcaaaagttttttcatgatatccctcctgccaatagggtttgttattctaccttatttattctcgaataagggacaggaaagttatgaaaaacaagaaataatccgatcctctgttatcagcttatgtaccgggatgtcatgcggcagacggggtacgtgcgcaaacaactggcactccaaaagcaaagagactgtcttcccttcatattcacttaaatagcgatcataatagccgcctccaaagccgaccctaaacccgttaacatcaaaacaaacacccggaacgatcatcaagtcaatttgtgatgggtttacttcttttgttttttcaattaccggctcgagcagtccggcgtacacggtttcgagctgatcatcagtctgatatgtgcgaaattgcattttcttcgtgtccggatggcattttgggatgcaaacttgtttcccttcttcccaagcctgctcaatgacaggacgcgtcggtatctctaatcctctggaaatagtgacggcaatggtgccggcattttgccactccggcagagaaaacaagtacttatacatacgttccgttttttgaagaatatcttcatttgataaagcagacagtgcctccagcgtcttttttcttaattgtgatttcatctctcatccccctcggaatagaaaaaaagccagaacctttttcaaagctctggcttttttcttacacctcaaacagcaaagctgttattttgtttcacggtgtaacgtagattttttatcacgtgggcaatattttttaaattcaacgcggtctggattgttgcgtttgttctttttagaaatatagttacgctcaccacattcagtgcaagccaaagtaatattaacgcgcattattttccctccaaactaaaatcatttacttattcagacttatatataataccactataatggacggaatgctaggctgtttttcaatgaattgctgaattattgaagatacgctcataaagctgcaaatatgatgacataatgagtcgggggtggtggagcttgaacacttgttgtctgccagcttcttttatccggcgggctttttcccggtcttttaaaaaactgtccagcagatcagcagcttcctgtacgagcgtaaaatcagcgatgattgccgttttgtcatgaaccgcataatcacaaaaaccacctgactgagaaacgacagtcagcacaccttgttccatgctttcttgcgcggcaagcccaaacggttcataagaactagggaaaacagccatttcacagtgagacagtaacgttctgatatctttcctatttagaaacggcagaaacatgacgcgatccttcaggttatatgccgcagccaatttctcatagcaggacagagacggcccctccccagccagcactagatagaggtcaggctgacgctgcttcaagatggcaaacacctttaacagctgcgataatcctttttccggaacaaaccttccatatgaaaagaggaatcttctattcatgcttctcgggattttccccttctcttcctccatagatgcagggcttgggataacggttattttcttatgtgccgccttatcaagagaccgcttcataaatgtgcttaatacgatcaatgcatcagcggattctataaggagccgttcggtcatgagcctgtatgggtgtggggcttctcggcacaccttcttcctttcgctttcaagaccgtggattgtcgcagcaagcggaaggccaagccgttgtttcaaatactgggcggcaggggcagttgtgtcatcatgggcatgaatcagatcaaagcgtttattgtgtgataacacatggcgaaccattgtaaagttagcatcagctatgtaatcttcaaacttcgcatacgaaaacagctgcccgctcggagtaaaaaccgtaatgttgatatgagggtttaaataggaaatgaggcggtttaaatggacaccgagcccgcttttcggctcatcgggatgttcgggtgaaagcatgagaatgttcaccgttctttttcccctctcccataacaggtgtatgcagaaaattgcgcctcccacctggtgtgcgcttcttcaatctgaaaactgtttatatgacgaatcccattttcatcaagatagatgtcgtctgtaccggcaagcttgagagagacattcattgaattcacaattctgtattcagcccgatatacagcatcaccagccgcctgtctaatcgtccattctcctttatcatacgttgtgcgttttgtcctgacagcttcaatgtcttttcttttgatgacaatgcgcaattcttttatcatatcctgcgttttttcgaaaaggaccgcttcagccagccgcattgtttcttctgagatttcccagcttacggtcaaggtgtgagcgttttgaatgattatgtcgaatgtgtccctaaaaaaggaaagcttatgtcgtatattatagggaaatgggtgtttatccatggactcctaacattctcctttccaatcgttcacttcgtgttcctattaaaccattacatgaagaagaagcgaagaaagatttctcgacaaaatctcgtttttttcgcgaattcctttagaaactattggttttatggtataaaaaagaaggataaaaaaagaatagaaggtgatgaaacgtggaaattgctattattgcgttgtttatcgtcagtatagcgctaattgcattctcatattctcaaagagacccgatgaaagatgtagaacaggagctcgaaacactgcagctttctgcgatgcaggaaatttacaagctcaaaaagaaaatgacagtgcttgaggaagaattactggaaacaaaccttgtcattcgcaaatcaaagcagaacgacatcaatcaaaaaatcgctaaacaaatactttctaaatataataacggtatgtcagctgaagcgattgctaaagctgaacatgtatcagtggaagacgtgaatacgattatcaaagataatgagaaggtgctcgtatgacaaaacggggcattcaggcatttgctggcggcatcattttagcgacagccgttcttgcagctgttttttatctgactgacgaagaccaggccgctgctgtaaaagataataaaacagtaaccgaacaagacgtgaacaattatcttgattctaaaaaattggtttctgtcaaccgtgatgaatatcaaaaacttctcgattcaaaagagaaatccttaaacaatgacagcggctcagacacgaaatcagacaaagtcaaaacctacaagctcaccattaaagacggcatgagcacggcggatgtatctgctattcttgaaaaagagggcattatctcttcggctcaagactttaatgactatgtcattgatgccggctatcacaaagaaattcgtgccggcgagtttaaagtaaaatcagacatgagtttcaaaaagatcgtaaaaacgttaacacgataaaaaaacaggctgactcagcctgtttttttcatccaaactttcctgaaatgtaatcgagcgttctttggtccttcgggttagagaacattttattcgtattgtcgcattcaacaagctcgcccatgtagaaaaaggcggtttgatcagaaacccttgctgcctgctgcatgttatgcgtgacaatgacaattgtatatttatctttcagctctagaatgagttcttcaatttttctcgttgagattggatctagtgcagatgtcggttcatccatcagcaaaatatcaggattggtcgcaagtgctctggcgatgcaaagacgctgctgctggccccctgacagcgaaagagcggacgtatgcaatcgatccttcacctcatcccataacgccacgtcttttaatgacttttccacaatttcctgaagcttcttcttatttttggtgccgtggactctcggtccgtaagccacattatcaaaaatagattgcggaaacggattccctttttggaataccatgccgatattttttcgcaaatccacgatgtccactttatcctttaaaatgttgctgccattatagttcagctcacctgcaagctttacattcggcgtcatttgaatcattaaattcaatgtcttgataaaggtcgatttcccgcatccggatggtccgataatcgccgtaacctcattttcataaatgctcaaattgatattttttaaagcatgatgctgcccataccataagttcattccattgacttgatatacttcctgtttcattacagcttcggtagcaatactcattgccgccctcctatccgaatttcccgttaatataatcctctgtcttttgctttttcggactcgtgaaaatctgttcggtctgtccgtattctacaagctcgccgtttaaaaagaatgccgtccggtcagaaacccgcagagcctgctgcatattgtgcgtgacaataataattgagtattctcttttcaatcctgtaattaattcctctatttttgcatttgaaatcggatcaagcgctgaagctggttcatcaagcagaagaacagccggcttcatcgcaagcgttctcgcgatgcataaacgctgctgctggccgccggataacgagagtgcggatgaatgtaaacgatccttcacctcatcccagagcgctgcttttgttaaactttcttccacaatttcatctaaaacagctttattccgctctccggcatatttcaatgcatgtgtgatattcgcatagatcgatttcggaaatggatttggtttttggaaaaccattccgatttctcttctcaagctgacaacgttaatattgccgcccaatatatttaatccctcataaaggatttcaccttccgctcttgcagatggaattaaatcgttcattcggttaatatttctcaaaaaagtagattttccgcatcccgacggcccaattaaagcagtcaccgcatttttttcaatatccatgtttacatgatgaacggcttgtttatttccgtaataaatggacagatctttgacctcaagcacgtggttctgcttcggaacaataacagctcgctcaggtttttcttttaccatttgttcagacatgtttttcgcctctttccgttctaatttgccgtaagctttttgtagatcatcgtgccaagccatctcgccgcgagattaaacacaagaacagaaatcaccagcacggcagaaccaccgttggcaatcgcttcagcatccggaatcattccttgtgtattgacgttccaaatgtggaccgcaagtgtttcagcgggcctgaaaatattaagcggtgatgtttccgaaaacgggttccactccgtaaaattaagacgcggtgttgtcaggcctgccgtaaataataatgcggccgcttccccgaacacccttcctgacgctaaaattgctcctgtgatgatagaaggaatcgcacttggaattaaaactgtttttacggtatgccagcgtgatacacctaaagcgagagaggcttccttcagatctttagggactgaacggatcgcgtcttctgtcacacgcaccatgacaggaaggttaaaaacagttaacgcaagcgctccgcctatgatcgtataaccccagcctgttaagttgacaaacatcaataatccaaacatcccaatgacaatagacggaagagatgaaagcacctctatacatgttctaatgaagtcagttactttgttattaggcgcgtattcagccatgaagactccgccgcccacaccgagcgggattgtaatcagcattgtaataaacaaaatataaaaggagttaaacagctgatctcgtatgcctcctccagctgcaatggcgctcgactttgttgtaataaattgaaaactgagctgagaaacaccgtttataataatataggaaaacaaacctactaaaatggcagcgataatggctgcacacaaaccaaacattccggtcgccagtttatctgttattttgcggttcattacactttcctcctagatgacaagtagcgaataagcaggatgaacaagaatgacatcaccagaagcacaagccccattgaccacagcgtattgttttcaacacttccgtatgtggtgtggcccatattcagcgtgatgatcgttgtcagcgttcccgcagtgtcaaacgggctttccggcaatactcttgtatttccaatgaccatctgaacagccaaagcttcaccgaacgcccgagccatgcctaacacaacagctgtcatcaatgttggaaaagctgcaggcacaagtacttttctgatcgtctgccatcttgtggcaccaagcgcgtaagaaccctctcgtaaactcttcggaagagaagccattgcatcagcagaaatcgatgtgatcgtcggcagaatcatgacggaaaggacaatcgttcccgccaataaactgtgccctgttccgctcgatttgaactgggcgataaacggcaccaatactgtaagacctatgaatccataaacaacagatggaataccgactaaaagctcaatcaccggctgcagcactttctttccccaattcggggcaatctctgtcataaaaatcgcacctgcaatgccaagcggcgcagcgattagagcagaaagaatcgttactgcaaatgagccaaaaataaatggcagcactccgtatttcggatcactatctgtaggattccaatttaagctcgttaagaattcaattgggcttacaccatttacaagaaaagattgcagccccttaacgccgaggaaaatggtaatcgcaacagatgccgcaatcataatcagtgcacaagctgtgactatcattcttccccgaacttcatccaattgccgattttgcctagagctgattaagcgctcgctcacagacatattttctctattgtttatcattgttttacactcctatgaatgtgttaagaggagaaacggttgtccccgcactcctctttttattaagatcagctttgcttcccgttggcatcacgtgtcactttcatatcagtaaccggaatgtagccttggtcagtaacaatgcttttttgaatgtcttcactctttagataatcaagaaattctttagctaaacctgtcgcttcaccttttgtataagaatgttgataagcccagatcggatactcgccagttgctacatttttcgcttcaggtttaacaccgtcaatagatagagcagttactttgtcatctgttaaatatgagaatgcaagatatccaatcgctcccggagtatcagcaatgatctttttcaccgtgttggaggaatcttcagtaatgccttctgcaggctccgctccgtcaagcgcatatttcacaaatgtagcacgtgtgccggaagaatcagggcggtttacaagtgtaatcttttggtctttgccgccgagctctttccagtttttgattttgccagtgaagatttttttcaattcatcttttgaaatatcctttacaccagcatcagggtttacagctgctgccataccaactacagcgacttgatgatcgacaagcgcttttgcatcgatgccttctttttcttcagcaaaaacgtctgaattcccgatctgaacagctccttcagagacttgagaaagccctgttccagaaccgccagcttgtacctgtatatcagcatcagggttttcttccataaatttttccgcggctgcaagtactagtggctgcattgccgatgaaccagaaatggttaaagaacctgatgccttttcttctccttttgcagaatcgctattcgattttttactttctcctgcatttccgcatgcagctgcaatcatcataaaagcagccatcagaagcataagcaccaatttgttttttttcatttcctgaattccccctgcgtataatgtgtaatttgtcctacacgtatagagtaaaggttctatgtaaaaagggtttgaaccgaatgttaaggttttgtaaatcagtgcgtttttttgtataaaaaaaacgcccacatcatgtgagcgtttttttttagttatcagaagacgttgtgttttctgcattttcttcaattttgtctttattcttttgctgagtaccttctttgtcctgcttcgatttcagctcaaaatatttatccattacttccctgccgatttcgtttgtaattgagtatctttgattgtaatcaatgtaagtccaaggaactacgacagaaatagcaatctcaggattgtcagctggtgcataagccacaagcgtcgtattataagtgtctgttcctgtttttgatttatccggtccgtcgtaaaatgattgggctgttcctgtttttgcagctggtttatacgatgctgaagccagttgacctgcagctgtccctttagtggcaacccgtctaaaaccggcttggacctcttcaatatagctactcttcatatcgactttattcaatacttcaggctgaacagaatcaacgactgcgccgatcccttttttcgcatttgaatctctgacttcctttacaagctgaggcttcatgcggtagccaccatttgctatggtggagacatattgagccaattccagcggtgtataagtatcatactgtccaatggcgaaatcaagcaagaaaccagataatctgcttgtacctttatatcccgtcatttcatttggtagatcaattcctgtttttactcctaatccaaattgactgaaataatttctgaaggtatcaaatgcagaagtatccaaaggcaatgcttggtgaggtttatattcacctttaccaactgcaattgctgttttaaacataaaaacgtttgatgacttctctaatgcagtttgaataccaaccggccctaagttttgccaagattttttccctcttttatcctggccgatatacaatggttcatccttaaatacagtattcaaattaatcgctccagtttgaagaccggtcaaaacggttgcaccttttacagctgatcccatagcgtaggatgaagtcatggctcctaatgcataatcatcaaacttataggctccattttctcgtttaatctgcttccctgccattgtcagcacttcgccgtttctagggtccatcatgacaacgaatgcacgatccaacaattcggtactaggtcttgctttagcagctttaagttttttctcaataattttttccactgatttttgcaaatcaatatcaattgttagtacaagatctttcccggctttgccttcagataccgtttttgttcccgtgacattgccttttgaatctgtgatattttcgacttttgctttttggccctgcagaaggctttcatattggtattccagatagctttttccgaccctgtcatttcggctgtagccaagcgacagataatggtcgagcaagttggacggcaatccttcattagagctggaaacacttccgagcactgagcgaagaaggtttttataaggatattcacgttcccaatcggacgtgacatcaacacctggcagttcgtctaaatgttcacttaccactgccatttccttcgctgatacatcttcgtttttgatatattgaggggtcaatgcatagcccgaatccatctgtcttttgatagcaaggatctgcatatctttatccgtcaattcattcagctgcttatcagtaatccgttttagctgaagctggtataaatcgtcatcggatatttttttgtcttcaacctgctgtctttctttagagctaatgagctttttcgcttctttcggtctagtcaaaatccaataatcttttttatcccgttctgttactttttttgtatcgactttgatcatgtcagacagcttttttgcgatctttaagcgctgttcttgcgtggtcgatttagatctcgtgtatgtgattgcatttaaagccttatttgtcacaatggcattaaagtttcgatcataaattttcccgcgtggtaccgctgagctgacttcactttgttcctgcttattcgcttggtttttgtaatcatcaccttgcacgatctgcttgatgcccagttccacaataatccaggtaaatataacaaaggcagctaaaaataaaatattcagccggatcggaagcgacttctttttctctttatgattttgcttttttggtttatttctcctcataacatcaccttttctatttacagaaagaaaagacactcaagtaagagtgccagttttcattttaaaggttttttcgacttttttctacagataacccctttttggcaaaaaaattatctctcgccttttaaaagggtcggttctgttacccgtttttggccgtcttcttccatggtttcattttccccttctttctccttaaaacgaatatccttgacaaagtaataaatcaaaggatgtcctatacccaatatcgcaagtgacaaaggaattcccacatcctctttcagaagggccacaatcaggagaaagcacaaaatggaaacaattctgccggcgttcaagaacatttctctaagcacgatatattcaattcttgcttttctggcatgcctcgcgcgccctatcacatcatatgtaagtgatacatatggcacaagcaacagaggatagccgatggcaataaaaacgccgtacgttaataatgtcgaaaagctcatatggaacagaatcaaaaacagcgcgccatacaaaataagtccgcccagcaaaatcgatttttttctcgcctttttcttaatcagcctggatgcaaagtagtaggcaaagaaggaaacagctgaattgacaagaccgaatgtaccgagagcaagctcgctgtttgtctcaataaatacaaacacactgattaaaaagacaaaaatcccttctctcaaaccctgaaaaaaatgcgcattcgtgattctccgccaattcatattgctatggcgctctccaaatactttgctcagcataaaacggccctttgattctctccgttttaagaaaaagctcatcacgacagccagggcaaataaactgagggagagactgaaaatcactgtataacccgtattattttcaagccttgagatcacgaatccggctacaatcgggccgatcattcctgcagaggaagacagaatgcccataaacccgttgaaaaagtctcgtgtatccggctctgttatttcaaaggtcagcacgttaaacgctagccaataaaagccatagccaactccgagcaccgcgccgattagcacgaggcggctggccgccgtttctccggctaaaagcacacttaaataaaaggcagctaaaaaaatgacgccgaaccttaaaatgaataccctgtctatttttttggctaaccgtccagccaaataaaaggttatcggctgcattgtcacaatggataaattatatatcgccaaatcaataaatttccctgactgcttccaaagatacacattaacaaatgtattggacagtgcaattcccagcgagtaaagcccgccaatggtcagcagaaagagtaagcctttgtttacgtctacatcgcctatcactttttttagtttgctcattactgactcccctttactatcccttagtctgtctcactcaaaccgagatatgtaaaaagaagacataaaaaaacaaggtcccataatgaggaccttgtttgtgccattattttgcttcgctgtatagacgagccacttcgtcccagtttacaacattccagaaagctgaaatgtaatcaggacggcggttttgatagttaaggtagtaagcatgctcccaaacgtcaagacctaagataggcgttttgccttctgaaagcggagaatcttggtttggcgtgcttgtgatttcaagtttaccgttgttcacaacaagccatgcccagccagaaccgaagcgtccagctgctgctgctgcgaattgctctttgaatttgtcaaagcttccaaatacactgttaatctcttcagcaagcgcgccagtcggttcgcctccgccgtttggagataaaagtgtccagaataatttgtggttcgcgtgtccgccgccgttgttgcggactgcagtgcggatgttttcaggaacagaatcaagatctgcaacaagctcttcaactgatttgttggcaagagcagtgtttccttcaaccgctttgtttaaatttgtcacgtatgtgttgtggtgtttcgtatggtgaatagtcatagtttccttgtcgatatgcggttctaaagcatcgtacgcataaggtaattctggaagttcgtaagccatgataattcctccttagtatatatgtactgaaatgccgcttcacagcgagcctttcttcattcaatgtaacaaaagaatgctttgtaatcaatgaaaaagctcacgatttggctcatttcagcggacatatttcactttaaccgataatctgccccattaaacctgccgccagcatttcttataggaccgtccataaaaagtaaccgatcatcaaaagctgtatgatgccctttgcaataacccctgttaaaaaaccaatgagtgagccgaggccaattttaaacgctgactttaagtccttctgatggacgataagttctgcgcaaacagccccgataaacggccccaatatgatccctgcaaccggaatgacaaaaggcccgattaataaaccgatcgtgcttccccatatggcagctttgcttcctccgaacctttttactccaagcagattcgacacgtaatctgctgcgaataatactgcggcaaaaactgcctcaacaagccagaacatataagaatacggactgaatgaaaataaaaatccgtacaatacaaatccggcaacaataaatactacgctaggaataacaggatacaccagcccgataaaggcaatgataaaaaccgctgcaatcaacagccaatacaacatatccatagcttccatcctcccattttactctgtcttcttcatgtcttccttgtattcacacgcatgcaacgatacaataagcaacatatattagtttagctaggaagtgaagatagtgaatgtgtttcagcttttcattaaaagtacatactctccccgtgatattgcaaaaacaagatttcaaggaatcggaaaagcgattctttatgtatttttgctctctgtcctgtttgcaatccctaccgcttattatgtaagtacagggaccgtaaaatcaatgaacggctttaaaactgttttaaacaaagatttccctgatttcacaatttcaaacggcaaacttcaaacggatgagaaaaaagccacggaatctcaggcaaatggtttcgttatcgtgttcgatccgacagactcctatggcactgaacaaattgaagcaaagcaaaacgcaatcggcatccttcagaacaaatttgttttggccattgacggacaagcccaagaaatgtcttactcaatgatgccgtcagagttacagaaaaaagatgtcattgcaggtttaaaccaaaataaagcgatgattgtaactgttctctcagctcttatttttctcgtaacagcagcgggaaaatttattgaagtatcgtttttagcgcttatcgggttaatcattaagaattcgcagaaaaaacatttatcctatcatcagctctggaagctttctgcttattccatcacactttcaactgtattctttacaatcatgcgggcactagaagcaaccgtaccaagtgaatttttgctgaactggtttgtcaattttgtcatcctgtttctcgttttaaaagagattccgtccaaaaaagtaattaataaaagttaaattatatttatttttatcctttaagtagagagtgtgaaagcatttgcattaactttttacttaagggatatttaataaaatgtatagagcttaaacagatacatttataaaaaaagctctacaattactcaagaacaagctctggacaataatatcagaagtagtaagatgtaacatgaaagaagttcttaacagcatttgacatatgtttttaacaaaataagaataatgttaaattttaactaatagactagttaaaatcatatggcaaaatattttgcatcctttcacaacatatttacataagatagttgctatttaaaaagccaggtaccaatagggcacctagctttcagaattaaatcatcaacaagttagaattatcttctttccttctattctcattattgaactgttatcttttttgtgggtttatgtatacaaatgcagctcccttagctttccccttatatactgataaacctactgcccaaggtgttcctgtcggttttggtaatttactgaagtaaaactttttggttggagttctacttgaaaagtaccctgaatattgcgggccaatgtccccaccctcaactatagatacaccaaagctcttataatttagtttaccgcattttccatttgtttcggcgtaagcatcaatagatgttgcactcttagtatatgtataagcatctgtaataactcttattttacaaccagaaataccacttaccggttgccaaccactgcttgcagcctctgctttttctttaggtgcaactaccaaagttaacattagtagcaaaattaaaaacacagaaaattttccttgcttcattttgtagatcctcctttaaactattacataattatcctaacagatccattgttcattgtaaataatggaatacgagttttatattataaaagcctctttttgatctaattttgcactattttctattttctatctgaagttaatgtttagtcgaagaaatcctgtcaaaaaagcgcctgtataaaaaccgagcattcgcagtctcttttcttttgtcatgaatcgaaatggacaagcatactatggtataaaatttcgtatgcgggaggaaaagcgatgaagcgtctcaccttagtatgcagcattgtttttatactttttattcttttttatgaccttaaaattggaaccatacccattcaggacctccctgtctatgaagcatcagcaaaaacggctgtacaagaaccggcttataaaacggtgaaggtaaagccgggtgatacggttatgtcgatagtcggatcagcaggttctccggatgacattgtaaaggattttgaagcactgaatccaaatgtgaaagctaacgccattcaagccggaacagcgtataaattcccggtctacccttaatttaacgttaatttcttgtcagttcggcgaagacactgttacaatgtaatttgtaaaataaattcacataaaccatactagaattgttatatctagaagcggcaactacaattaaggagcgattgcaagtgagtgaaatcacacatcgtacaaaaacgcgtcccgtcaaagtgggacctttaacaataggcggcaacaatgaagttgtcatccaaagcatgacaacaacaaaaacacatgatgtagaagcaacggttgcggaaattaaccgtttggctgaagccggatgccaaatcgttcgggtagcatgtccggatgaacgggcggcaaacgccattgcggatattaaaaagcgcatttccattcctctcgttgttgacatacatttcgattataaacttgcgttgaaagccattgaaggcggcgcagataaaatccgaatcaaccccggcaatatcggccggcgcgaaaaagttgaagcggttgttaaagcggccaaagacaaaggcattccgatcagaatcggagtaaacgccggttcattggaaaaacggattttagaaaaatacggttatccgactgccgatggaatggtagaaagcgcacttcatcacattaaaattcttgaggatcttgattttcacgatattattgtcagcatgaaggcctctgacgtgaaccttgcaatcgaggcttatgaaaaagcagcgaaagcgtttgactacccgcttcacctcgggatcaccgagtcaggaacactgtttgccggcacagtaaagagcgcagcaggactcggcgccattttaagcaaaggcatcgggaacaccatgcgcatttcactaagcgcagaccctgtagaagaggtaaaagtagcaagggagcttctgaaatctttcggcttagcctccaatgctgccacgctcatctcatgcccgacttgcggccgtattgagattgatctaatcagcattgccaatgaagtggaagagtatatttctaagataaaagcgccgattaaagttgctgttctcggctgcgctgtaaacggacctggtgaagcgagagaagctgatatcggaatcgccggcgcacgcggtgaagggctgctgttccggaaagggaaaattgtccgtaaggttccagaggaaacgatggtagaagaactcaaaaaagaaattgacattcttgctgaggaacactacgcaaaacttgaagctgaaaaagcaaaattaaaagaagaaacacaaaaagcttgacgggaacccgtcaagcttttttgtgttagaaaaatggaataataaatattccaagcactaatgaaacgacaccgatacccattgcccaggctccaaggccttgagcacctcttcttcttgcgatatagccgacaataataccagcagctcccaataaaacaggcagtacaaacaatgaaatgatggacaaggctaaagcgatgtaccctattccccgtccttcattgacattgccgccgctgcgatcattgtcttggtcattgctgcggtcagcagcacgataaggctctgcgatttcagcagctgtttcctcaaaaaaaccgtcattgtcgcgggtaatatttgtcccttcagatccatgatcaacatagtaactgttgttatcacgcttttcgtaatcgtttgccaccttcaattcccccttctgttttattaaaggagcttttatagtttgatccattttgcctgattcatgtttgctaaacttttctgttaatgtcaattgtttatgttacacttgaagggatgaaactgaaggagtgtgggcatgttacgcttaggaatagatattgacggcacaatcacggctcaggatacattcgtcccttatttgaaccgttcgtttaatctttccatttcattaaacgatatgacggattatgatttaacaaagctgttaaacattacccaggaagaattttgggattggatgaatcaaaatgaagcgatcatatataaggaagcattgcttgcacagcatgcgaaacagtctctcgatcttctcaaagaggagcacaagcttatttatattacagcgagacggactcatttaactgatattacttatgaatggtttgacagacaaaacattcattatgaccacatcgaacttgttgggggtcatcacaaagttgaagcggtcaagaatcataacatcgacctgttttttgaggatcatcacgggaacgccatgatgattgcgaaagaagccgggataccggtgattttgttcaattccccttataatcagcttccgattgattcaaacatcatcagagtaaacaactggctagaagccgttcaatggatgaacaacaacaagcatcacttaatacgcgtcaataactgaaaaaggagcccaaaccgggcccctttttcatatatacgcattttacgcagtagtgttttcttggttttccgctgtacaatcagggcatgtgccataaatctcaaatttatgcccgctgacctgatagccatccaaatcatcacaaagcttgtccatcggacatgattcaatttcctttgttttgccgcaggcaagacaaataaaatgatggtggtgatgggtgaatgaacacttaaatcggaagagcttttcaccggacagctcagttgtttccaaaatcccaagttcttcatataaagaaagatttctgtagattgtatcaaagcttaagcctggataatcatcattcagtgcagacagtacgtttttagcggtaagatatctgtctgaatcagcaaaaagctgcagcatatcctcccgtttgtttgtatatttatatccgttttcttttaataggttcagcgcttcttggacgttcatgaagggtcccccttttcgctttgcttaagaacgtatcacatgtatgaaaaagaaaatggcagctgtctgtccagcaagccattttctttactgcagataaaattatacccataaaatgaataaaagtaaatgaaagcctagtggattgcgtttttgaattttccgcctctcgtttcatgagtattcataattgttatgaatgcattttgatcaacttcaaacacgatcgatttgagctttgtcacttccagccttgtgacaaccgcgtaaattacgtctttttcttcgtccgtatacccgcctttccccttcagcttcgttgtgccccgaccgagacggtgcaaaatcgcgtcggaaatctcatcatactgctcagacacaataatgacagcttttgtttcatcaagcccttggatcacggcatcaatcgttttcatcgcaatataataagtcatgaatgagtacatcgcttgctcaggaccgaacacaaaaactgcccaaatgaaaatgaacacattgatgaacataacgaactcacctacagaaaacgggagttttttggtcagcaaaataccgagaatttctgtaccatccattgaacctccatttcgaataacaagcccgacgccaaagccgagtaaaagacctccgaacacagtagccaaaataggctgggttgtaatggcttctacatggtgaagtgaggattcaataacggcaagcccgacaatccctataaacgtagagactagaaaggtcttaccgatatatttatatccgaagatcataaaaggaatatttaatatgacaacgaaaaaagcgaaattcagaaaggggtttgacataaagaggtggtctaaaataagagatacaccgataatcccgccatcaataaaatcattggggattaaaaataattcaatacttacagccgcagatgcagctcctaccagaatcataaagaccctgaaaataaaatgggtaaatgtttctttcttatgttgttttgttggggtcataaaatctcctttcctgcaataactattttaaatacattataaatctattttaccattaaacactgacacattttactgatttgcccatacattaagtctggaggtggaatgaccgatgattttatttcaaagaattattttgcagcggcttaatcaggctactgctgatgatttgctgaagtactcaaaacaatacggaatcagcttaacaagatcgcaggccgttgaagtagcgaacctgttatacgggaaaaatgtaaacatctttaatgagagtgaacgaatgcggctgctgaaacaagtagagacgattacatcgaaagaaacagctcaaacagttaatgaactattcaaacaatttacaagctaaaaaatgggggtgttatcccccattttttattgctgtaaaatcttttcaagcaatgtatcatcaaattgtttttctttcagcatttcaatctcaaaacggtatggcggttttttgttctttttatcttcaccgacgtatggtgtttcaagaatttttggaatgtcttttaactgctcatggtgaacaacatattgcagtgcgtcaaaacctatttcaccaaagccaatattttcatggcggtcttttctcgcacctttgacatttttgctgtcattgatatgaagcactttaatacggtcaatgccaatgattttatcgaactcatttagcactccgtcaaagtcttcgacaatgttatacccggcatcatgtgtatggcacgtgtcaaagcacactgacagctgctcattgtgtgtaacgccttcgataatctgcgcaagctcctcaaagcttctgccgcattctgatccttttccagccattgtttctaatgcaatctggacattttgattcggatcaatcacttcatttaagccttcaataatttttttgatgccggcttcagctcctgcccctacgtgagcgccaggatgaaggacaatttgcttcgctccgatggccgctgtccgttcaatttctgaacgaagaaaatcaacacccagctcaaaagtggacggatttgtcgtgttgccaatattaataatataaggcgcgtgtacgataatctcgtcaatgccgttttcttgcatatgtgcccggcctgcttctatatttaagtcttcaattttctttcggcgcgtattttgcggtgcgcctgtatagatcataaacgtattcgccccataagagactgcttcctggcttgcagccagaagcatatgttttccgctcatagagacgtgtgagcctattctcagcaacaggttcccctactttcttttcttagattggtttcttctctgttttttcttgattttctccatctcatagctcattttctttttatacccaggcttaaccttcttcggctttttcacgagacgatgagcaatttcatccgcttcattcggcgtttttttacgttttttgcggcgctgacggtcatcgccttttttccattcgcccttttcaagctctaagtactcaaattcgatgcccattttttcaagtcttactaatgcatcctcatcagtaagctcataaatggtcatcgcttgtcctgatgagccggcacgagccgttctgcccacacggtgaacatagaaatcgagatcatccggcagctcatagttgataacatggctgacacctttaatatcaatacctcttgcggcaaggtcagttgcaatgatatatgtgaattccaaatcattgatctgcttcatgacttttttccgctcacgtggtgttaatccgccgtgcagcaagccgattttcatgcctttgccagtcagatactgggcaatatggtcagccgtatttttcgtgttggcaaacacaatccccaggtatggattcagatgcgacatgatgtcaaaaaggagcttgtccttgtcacgatgtttcgaaggaatgaggatatgctcgattttcgcagcagtcacctgttttggctccacatgggcgtatttcggattttccatgtatttcttcaagaatggtttcagcttttccggtatggtcgctgagaacacaagcatttgcagatcctcaggcatgcgggaaccgatgtaatctacatctgcaaggaatcccatgtccagcattaaatccgcttcatcaataacaagagattccgctttatgaacacttaacgcctgttctttgattaagtcagcaatccgtccaggtgtaccgacaacaagatgcggctgtattttcaatttatcaattgatttttgtttatcagtgcctccgataaaacatttcgagcgaatctgacttccttcttcaccctgcgtgattttaagcgcttcctgataaatctggttggcaagctctcttgtcggagccgtaatgactacctgaacgacatccttagcaggatcgattttgtttaataaaggcagtaaataagcgtgagtctttccagtacccgtctgagactggccgatgacgctttctttttttaacactgcaggaatcagccttttctggatatcagtcggttcgtaaaaaccaaggcgatgtactgcatctataataaatggtttcaattcataaagttcaaatttcgtttctttcatttttcccagctccttaaagcggcacattatgtgtccatcatcacattatacccgattttgcttaaaaacaccacgtttgcaaggcgtttgttttattcagttatgtaaagcaaataccgcagcccatgcatattctaatagcagagagagctgaaaggaggtacaagtatgttttcaccgcagcagccaatgagaaattacccacagcccggaccgccccgccccatgccaaatcagcgaatgatgggcagaagaccgcctaatatgcgaggaccttcatttggagcacagcagcaaggttttcagcaagccggacaatttcttcctcaggcaaatgccggagcgagaaatggtgcaggtgcaggcggaggcttaaaaggaatgctgtcaaggttcctccccggcggaggaggcgctggcagcgccggggttcccggaattccaggagcaggtgcagcagcgagcggaggtgctggcctgcaaggcattcaaaatattgccaatcctgcatcattatccagtatgcttggaaatgtgcaaaaagtactcggcatggcgcagcaagtcacccctatgatccagcagtacggcccattagtccgcaatctgccagcaatgatgaagctgtacagccaattaagtaaaagtgatgatactgagacagaggccaatgaggaaagtgaaaaacaatccgtttcagaagaatcatcagaaaaagaaaaagagactgaaacaaaaacctcagatgggaacaaaaaatcaaaaccaaaaagttcttctctcccaaagaaatctaaaacaactgacaataaagaacaagaattaaaaacatctgccccgaagaaaaaggaagctgcctctcctgctccgaaaagaacatcaggcagttcaaaaccgagattatatatttaacattctttgatatcttaagtgagattggctataatgagatcagaagaatgcaagaatagagccgtttgattacggctttttatattgcctttactcacttcagtattggaggacaaccgaaaatggacgtaattaaaatttcaccgcgcggctattgctatggtgttgttgatgctatggtcattgccaaaaatgcgtcgctagataaaagcttgccaagacccatctatatactcgggatgattgttcataataaacacgtcactgatgcgtttgaagaggaagggatttttacattggacggctctaaccgtctggacatcttaaagcaggttgacaaaggaactgtcattttcactgcgcacggtgtttctcccgaagtcagaagaatcgcagaagaaaaagggttagtcgcaattgatgctacatgtccggatgtgacaaaaactcataatctaatcttagagatgaaagaaaaaggatatcacgtgatctatatcggcaaaaaagggcatccagagcctgagggagccgttggcgtagcgccggagatcgttcacttagttgaaacagaagaagatgtaaagaaccttgatatccaatctgagaagttaatcgtgacgaatcaaacaacaatgtctcaatgggatgttcacgacattatggagcttgtcaaagaaaaatatcctcatgtcgaatatcaccaagagatttgcctcgctactcaagtgcggcaggaagctgtatcagagcaggcaaaaaaagcggacttaacaatcgttgtcggagacccgaaaagcaacaattcaaataggcttgctcaagtgtcagaggaaatagccgggacaaaagcataccggatcggcgacttaagcgaattgaagctcgaatggctgaaaggcgttaataccgttgcagttacagcgggagcttcaacaccgacgccgatcacaaaagaagtcattcgctttttagagcagtttgatcacgaagatccatcaacttggacaactgaacataatataccgctcaaaaaaatacttccaaaagtaaaagcaaaaaactgaggctgtaaaagcctcagtttttttatagaaatgtaaatggatttgtatctgtttcagaaacaaagatattcacgccaaactttttatcattacacattgatgtaagttttctcgtgacgccttctttcatgattttttccgcgtaatggcccggatcaaccacatttaggccaagcatcatcgcatcatgggccacatggaagtataaatctcctgtgacgtaaacatcggctccctttcgttttgcatgatgaatatacttgtttccatctccgccaagaacagctacttttttcaccatgctgtcagcatccccaaccattctgacaccattgacgtcaagcttgtctttcacaaataaagcgaattccttgagcgtcatctcatttttaagggttccgacacggccgagccctttttcggcgggagtctgttcgacaggatagatatcgtaagcgacttcttcatatggatggctttttatcattgcattgataacagccttttcgacgcttttaggaaatacagtctcaagccttacttcatgaacaagctcaagctctcccacttcaccgataaaaggcttagctccgtccaatggcttaaagctgccgattccttcagatgaaaacgcgcaatggctgtattcaccgatatggccggcccccgcatttccgagcgcggctctgacctgctcttcatattccttcggcacgtaaactgccagctttttcagaggatccgtataagtaggtgccagcacttccgtctcactcagctctaatgcttcagcaagcaaatcattcacaccgccgtccgcaacgtctaaatttgtatgagctgcataaacagcaatatcatgcttcaaacacttttcaattaaccttccggcaggctgatctgttgaaatatgctttagcgaccggaaaattggtggatggtgtgcaataatcaagtcaacctctttttcaatcgcttcatcgataacgctctctaacacatcaagtgtaaccatcacatttttaattggtttgtttaaggtgccgatttgcaggccgattttatctccttcaaccgcataggctttcggggaaaattgttcaaacagctggatgatctgctgcccatttacacttttagccatgatcgattacctcctttaacagctccattcgatcggcgagctcctttaatttttgtttgttttgctctgtatccgccgcttggctgatctgttcataaatgctttgagtgtgctgaagctcttgtgtccactttttcaaaaagacagcatttttttcttttgccaagaaagggccaacgagcatcccggctgataaagaaataccgtcataagccgcatccctgtctcccgcttctgccaccagcacctcatagcactttccgtcctcttcaaggattacctcatctatcagcgcatatctttctttataaagccactccctgatatgaacagcatgaatattcggctgtaaaatgagccgttccttccccgttaatttgtctttgcccgcttctaaaatgtgagcgatcaaagccccgcccattccggcaatcgtaatggcatcagcttcaccttttttaatcacttccagtccgtctccctgccttacagaaatgtgcgagtttaagcctgatttttcaacctgccgctttgcagacaaaaatgggccgtctgttatttctccggcaatcgccccgctggctttatgattcagcaccgcataacaaggaaggtaggcgtggtcagagccgatatcggccatcaccgctccattcggtatgtactccgctactgtttgcaatcgtttagataattttaattcgttcacttgtcatcacaacttttctcaatcattttttcctttactatcatataaaaaatcagcccggaatccaagctgaagcaaatgattttgaaattatttcttttgatgcgggtctgcacgcagcagtcaaaaataaaaggctgtcgagaacatctcggcggcctgtgaatgtataaagagaaaaatagttcttttatttaatttttgacacccactctgccatatcatccagcttatcggccggaacaagaccggaaggcattccattaccgcctttttcgatctttgttttaatttcagcgacatctttcttatcccctacaccttttaagctaggacccgaaacaccttcataattttcaccgtggcatgcgatgcagtttgccttgtaaatttcttctggtgaagcgtttgcatctttcttttcagcagatttgctttctcctccgctcgcaatctcccgagagtcatcaagtccttttactgataaaaagaaagttagaccaattcctaaaacagcgatcagcaaaaatggaataagcgggttccatttcatttcccttccccctttttgatccttccccctatgtaaacacttctaattctaacttatttttacaaaaagtaaatggattgctatacaaaagttttttattcacactttatacaaaattgaatagaaacatgcctaaatctctaatatcctttttattctattgtataatgtattgtatacgcttacaatagaaaatatggaattagattttgaaatttttcaccacaatgttcatttgcaaatgacatcatttttcagtaaaataaaggcatattatccatatatctttttaaaaaaagaagaacggatcttcaagacccgttccatcttattcaaggaaatctttcaaacgtttacttctgctaggatgtcttagtttccgcaacgctttggcttcgatttgtcgaatacgctctctcgttactccaaatactttgccgacctcttctaatgttcttgtacggccgtcatcaagaccgaatcgaagacgcaatacattttcttcacgatcagttaacgtatcaagcacatcttccagctgctctttcaatagctcgtatgcggcgtggtcagaaggtgaagttgcttcttggtcttcaatgaaatcaccaaggtgcgagtcatcctcttcaccgatcggtgtttccagagataccggctcttgagcaatctttaagatttcgcgtactttttcaggcgttaaatccatatcttccgcaatttcttcaggtgttggttctctgcctaagtcttgcagtaattgacgctgcacacggattaatttattaatggtttcaaccatatgaacgggaatccggatcgttctcgcctgatcggcaatggcgcgtgtaatcgcctgtctgatccaccacgtagcatacgtactgaatttataacctttgcgataatcaaatttttcaacggctttcatcaggcccatgtttccttcctggatcagatcaaggaacagcataccgcgtccgacataccgttttgcgatactgacaacaagccgcaggttcgcttcagccaatctgcgtttagattcttcgtcaccttcttcaatcttttgagcgtaggcgatttcttcttttgcagaaagaaggttaacccgaccgatttcctttaaatacatacgaactgggtcattgattttaacgccaggcggtacacttaggtcattaaggtcaaattcttcttcggctttggcaagctgctgaatattaggatcttctgtttcttcattctcactaattaattcaacaccttgttcacctaaaaattcataatactcatccatttggtctgattcaatttcaaagctggacatacgctcagcaatttcttcatatgtcaaaacgccacgttttttaccagactctgttaattgctcttttacttggtcgaatgttaattctgtctcgtgggtttgtttatcagccattatggatccctccttccaaagcttgcaacgaattctataagcggtatgattcttattcggtccattcaggcgttttctatgtgaactgcctttaacaatgtgcgaataatgaaatgacaattcatgatgaggttaagcgatctatttgctcctccgcaaggaatcattgccaataaatgctcctcatcagttctccagttattttaaagatcggttcaatgtaacgatttcttgagccaaagaagcagctcttaaaaaatctttttgcctttctgcttcggctctttccgcctctttttcttttatcattgaccaatttctttgattcaacactttttttacataatctgataactcggcttcgctaagctcttgattaacctgaagcattaatatatcggacaagagctggcttatatgatcatccgtcaccctggccatcagatgctgaggcgtcagctcggctccctcttcataaaaagcataaagataagcggctaatgcccggtgctcatcaatattaaattgaaaccctacccggtcaatcacttttttgatgacgctccgatctcgaagcatgtgagcgagtaacagcctttctgcattttcatacgccggacgcaaacgtttttgccttgcttttgtcgtcagatgcgctcgccgcgttttagtttcaccgctattgtcagcaggtttgttttgcttgctgaaaacagacagctgctcagttaaagactcctgtgaaagcgaaaactctgaagcaagctgctttacatagacttcctgctctagagaccctgaaagcgtgctgatttctttcagtacgtctttaatgtaagctaggcggtcgccttcatcggacaggttctttccttttcggaaatattgcattttgaacgccattacggtgacacttgcgtcaataatgtcgtttttaaatttttccccgccgaattttttgatgtaatcatcagggtccaatccgtcaggaatcattgcaactctgactttgcagccttttttttgcagaagctccgaagcttttaaggtggcttcataaccggctttatcagagtcatagcaaagaatgatttcttcgacgtttcttctcaggatcttgacatgatcatctgtaagagacgttcccatcgtggctatgctttcctttacatccgagcttacggccgatatgacatcagcaaacccttcaaataagactgctctttcctgctttctgatatgaaggcgggccttataaaaattgtaaagcagtttgcttttatgaaagagcggggtttcaggactgttcatatacttaggctgctggctgccaagagccctgcctgagaaagcaacaacagccccgtgatgatcatggatcggaaacatgacacggtttctgaagcggtcgaaatatccgcttccgtcttcgcgtctgatcaggagacccgctttttccatttgcgcctcactaaatcccctctttacaaggaatttcgtgataaagtcccaagaatcaagagcatagccaatctgaaattcattaatcagctctttcgtaaagcccctagaaagcagataatccagtgcctcttgaccttcttttgtatttattaacaaatgatggtaaaatttcttcaggagctcatgtgcctcagccattttttgttctccagaagactctggccgggctccggaatggactgttatatcatctggaaaatcaatttggtatttgtcagcaaggtgagaaaccgactcggcaaaagaatagccttccatctgccttaaaaaagagaaaacattgccgcccgctccgcagccaaagcaatgaaaaatctgtttgtcgggcgatacggaaaacgaaggtgtgctttctccatgaaaaggacagagtccaaagtagtttcggccttgcttctttaattgaacataatcacctatgacttcaacgatatctgccgacttttgcacctgatccacaatttcatctggtatccgatttcccatcttataacactccgtcgtacattattcgatgctttagtgcaaaatcccttcatcgttcgacaggattttttgcagcagtgtaataaatcgttctcgatcttctttattcaattttttaggccctttggcatatacgccttttcttctttgtttgccggaaaaatgacggccctctagggcaaaatcaatcgtgtcttccttgtaaagacgacctctttccgacataacagagacatttctgttcaacagcagagatgctaatccgatgtcctgcgtcacaacaatatctcccggtttcacgtgatttgcgatatataaatcagcagcttctttatgaggatcaacatacttccatttttcttcattgcttctggaaagctgataatgttcaaatgaagcgacaaaaagaacttgaacttcatactcggatgctgtttgtaaaatttcatcttttaccggacaagcatcagcatcgacaaaaatcgtcttttcttgttcattaagaagagtaattctccatccctccattaaactcctgcataaaagcaagcaaaatcgcacatcctttattattgtggatgtatatgaatttgtcgaaaaatttccgggagaaattcttgacatcttacccataatagtttattcgtatcacacgatccttaaacctaaaattaatcattttatcacaattttttattataatacaaacttcacaaagatgctattgtttttcattattcccttttggcacagccaaaaacccaggatagagcgtcctgagttatatgttttttgttttgagatgatggataatatttgctgtttcctcaaccgctttatttgaaacatcaacaacctggcagccgatccgatccacaatcttttcgaaatactcgagttcctctttgattctgttgatatttgcataaatcgctttatcattaagcccgagtgattttaaacgttcttttctgatatgattcagtttatcagggctaatctttaaaccgatgcattttttcggatcaacgttaaagagttcttccggcggatcaacctccggtacaatcggaacattggcaaccttcaggcgtttgtgtgcgagatattgagacagcggtgttttagacgttcttgacacgccgatcaaaacgatatcagcttttaaaatccctcttggatcacgtccatcatcgtatttaactgcaaactcgatggcctccacttttttgaaataatcttcatcaagctggcgcacccgccccggttcgtatttcgctgttaaaccgtaggctgtttccattttatcaatcaacgggccgataatatcataatataaaacatttgctttttccgcttcggctatcaaatattctctgatttccggcaccacgagtgtaaaacagataatgccgccgtctgcctttgcaagtgaaatcacttcattgatagtgcctatatcttcaacataaggaattcttcttacatgagtatcatccgccgatccgttaaattggctgagtgctgcttttactaccaattcagccgtttcaccgacggaatccgatacaacatagatgatgcggttattcatattatccccccgttagtttgcaatcttataggatttcattttcagataaactgacaagtattttggtcatatttgtttttgtcactctgccgatcacttcaaagcctttatcggtgtctttgatgacaggcagtgcatcaatttgtttttctattaagtgctttgcaatgtccatcacataatcctcgcgtctgcacaccgtaatgttcggcatccttgtcatgatgatgtgaacagggaccgatgtaagctcctgctggccaatgctcgctctgagcaagtcttttcgtgaaagcaccccgactaaaacagcatcgcggtccaccacaaacagagtacctacatcttctaaaaacatggtgcaaatcgcatcgtacacagaaacgttttcgtgaatcactacggggatagattgaaagtctttcacctgaagctttttgagtttatccgccaaaagctgtgtgccggtttttcccgtatagaaataaccgactctcgggcgcgcctcgaggaatcctgacatggtgagtatggctaaatccgggcgcaatgtcgccctggttaggttcagcttttctgcaatatgctcccctgtaatcggcccgttttcttttacaatctgcaaaatatgttcttgccgtttatttagttcgatcgtactcaccaccttttcacttcatagctatgtaaagaaataacaatccatattataacgtaaatatcttgtaatcaaacaaaaaacttataaatggggaaaagacgattaccgatcacacagcaaccgccttttctctctttattttacaataagggcattcatattcgcaaaggacttgatctcatccgccaagcttaccatttgcgctaaacgatttgcctttaatgactcattatccgctataaccattgtatgatcgaagtaagcatcgatcggttcttttaaggctgcaagtgaagcaagcgccgcctcataatcttttttgctgaagttttcctgcagattttgcttcgctgtttggtaggcatcaaacagttttgcttcgtattcattttcaaacagatcaggctgaatgtctccgcggactccttttttgctgatagagatcactcggcctaacgcttcggctgtttccttaaagccaggtgcaccaagcttttgctccagtacttgtgctttatgcagcgcagagtacggctcaagctcagagctttccagcacggcgtcaatgacatcatgtctgatttgttcagcattcaagacatatttcaagcgctgagtgaagaaatccagcagttcattttctttatcggtttgaacgaaagtaagcagctcttcaaatgaaattccccagttgcggtcaagaagaatcgcaacaataccgcttgcttggcggcgcagtccgtaagggtcctgggaaccggtcggaattacgccgatagagaagaatgaagcgattgtgtcaagcttatccgccattgctacaacagctccggtgaaagtagaaggcgtttctccgcccgctgatctaggcatataatgttcattaactgccgcagccacagcttcatcttcgccaagcattctcgcatacttttcgcccataattccttgaagttcagggaattcatatatcatatgcgtcacaaggtcgaatttagaaatttcagcagcccgcttcacatgttttaatgtatcttcatcagcctgaagacgaacggcaagtttctctgcgattgatgtgactctcctaaccttatcagcaagagaaccaagctcttcatggaaaacgatattttcaagcttcttcacatttgcatcaatgtttagtttctgatcttctttgtagaagaatgaagcatcagataaacgtgcgcgcagcactttttcattgcctcgggccacattttcaatcgcgtggctgttgccgtttcggactgtgataaagtgaggcagcaggtcaccgtttttgtctttgacagggaagtagcgctgatgctctttcattgtcgtgacaagcacttcttcaggaattgacagaaactcggattcaaatgaaccgtaaagagctgtcgggtattctactaaatgattcacttcatcaagaaggtcttcgtcaactggaatgctccaattgttttcagcagccattgtttccagctgagattgaatcatttgctttcggacgctaggatcagcaataacatgctgtcctttgagctgctcttcataagctgaaggtgattcaattgacacttcatgtccgaggaaacggtgtccctgtgttgtccgtccagactcaacgtttgtgatcgaaaatggaatgacatcctgtccaaataatgcgacaatccatttgatcggtcggatataacgcaaatcttcatttccccagcgcatgtttttcgggaaatgcaagcttgtaattaaaccgctcaattctggcagaagcgacttcgtttcttggccggcttggaatttttgcacgaatacatactctatgccttttacttctttgatgtacaggtcttccacatttgcgccttggccttttgaaaagccgattgccgcttttgtccagttcccgtccgcatcaagggcaatttttttcgcaggcccttttgcttcttcttttatatcatcctgcttttctgcgacatccttaacgaacacagcaagacgtctcggtgtattgaagagtttcacttcaccgtgagtaatatttttttctttaagccagcctgtcagcttgtcgccaagctgaaccatgctttcattcaaaaagcgcgccggcatttcctctaatccgatctctaaaagtaaatcctgtttactcatgagaagaaccctcccctttaagcattgggaaccctagtttttctcgttcctcatagtaggtttttgctacttttctagctaaattccgcactcttgcgatatagcccgtccgctcggtaacagagatcgcacctttggcatcaagcaggttgaaagtgtgcgagcatttcagcacatagtcatatgctggatgaacaagtccgttgtccatttgcttgatcgcttctttttcatatgtgctgaacaattggaacagcatatcgacgtctgatgtttcaaacgtataaacagaatgctcatattcagccatcatgaataaatcttttactgtaaaccctgacgtccattccaagtcaaacacgttttctttatcctggatataagacgcgagacgctcaattccatacgtaatctctacagaaacgggtttacactctaatcccccgacctgctggaaatacgtaaattgtgttatttccattccgtcaagccaaacttcccagcctagacccgcgcagcctaaagacggattctcccagttgtcttcaacaaagcgaatatcgtgctcaagcggatcaattccaagagcacgcaaggaatccaaatacagctcttgaatgttatcaggtgacggtttaataatgacctggaactgatgatgctgatacagtctgttcgggttctccccgtagcggccgtctgccggacgtctggaaggctctacataagccactttccacggctcaggaccgatactgcgcaaaaatgtatacgggctcatcgtgccggctcctttttctacatcgtaagcctgcataagcacacagccctgactggaccaatgcttttgcaaggttagaatcatgtcttgaatattcatttcaagcacctccacttttctttcataagttgactgcggcagcaaccaaaaaactcccgtctctatgcttgccagccgcaaacatagggacgagagttctcccgcggttccaccctagttgctgagaacaaaatcccagcctcttttttaaaattgctcaagaatgcctttcgttgcgtgctcatccttagcttacaccgccctaaggtcgctttcatgaggtaaacgcaagtacttctttctctcactgcaacatattttataataaatgatcatataaaaagatggaccaaatgtcaacttttgttttcacccataagatgtttcatgctttccatttgatctaaaaagcgctttgattttaaatacaatcccgaatattcttcgtaatataaatcaatcacttgctttaattcagcttttgtttcctcttttaaggacacattgccgagtctcgacagatcaaaatagtaaaagagccttaacagccttgccgtttgcggtttaatcggtatcctgtaaggatctttttcaaaacagcggtggcatataaaaccattatcacgaacagagaaatgaaaggttccgtcttggcttttacaatgtacacaatgattcagctcaggatacaggcccatgacaccgagcatcttcatttgaacaatgaaggtgataacatccggatctgttccttcattcaactgttttaatgattctaatatgaattcaaataaataaggatttggctttttttcttctgtgcctctgtcgactaactcagcaacataggcagcatatgctgttaaaaacaagtcttccctgatgcctctcatgctgaggatcatttccccctgctgaagcgttccgaggcccgatgttttttgcattaagaaagaaccatacaaaaagggctggctgactgctgataaacggctgttcggttttttggcgcctcgtgccataacacctatttttccgtgttctcttgtcagtaatgttacgattttattcgtctctccgtaatcatttgtgcgaagaacgatcccttcacattttgtcagcatttccgcaccttcctcaagcaggagcggccaagaggtttataaaattggataatcaaatcgggctagctcatcttctagttcttcgggtctttccatgttctctttttccagttctttaaaaagaagatacgtatcaacatttcctgtttgagaaaatacgttccaggtaaaattcaacacaagaaacccacctttctgtagttaaactagcttacctaaactccaaattcttacctttatcttgaccagatgtcctccatttcatgttaaacaaaatttgctaatgtatccctgttcctgtgagataatgacacacacgggaagagattaatattcgtcctctttaaagccaaaatcgcgaagctgggacattttattacgccagtctttctgcactttcacccacaattcaaggtagacacgggagcccaacagtgcttcaatatccgctctcgctctttttccaacctcttttagaaggcttccttttttaccgatcacgatgcctttctgggaatcccgctcgaccacaatcgttgccgctacgtgcacagaaccgttgtcctgccctttgatggattcgatggccaccgcaatgctgtgcgggatttcttctctcgtcaaatgcagcaccttttccctgattaattcagaaatgataaatcgttcagggtggtcagttacctggtcactcggatagaattgcggcccttccggcaaatacgcttcgatctgcgcgagcaaggtttcgatgttatttccttctaaagcagaaatcggaacaatttccttaaaaggataacgtttgcggtattcgtcaattagcagaagcaattggtcgggatgaattttatcaattttgtttacgattaagaatacaggcgtagacatcgtctgcaatttctcaatgatgaattcgtcgcccttcccgtagccttcctcagcattgatcataaacaagatcaaatcgacttcttttaatgtattttgcgccactttcatcataaagtccccaagtttatgcttaggtttatgaatccctggtgtgtcaataaaaatggtttgtgatgtgcctgtcgtcagtactccttgcaccttgtttctcgtcgtttggggcttatcgctcatgatcgcgattttttgtccaatgactctgttcaaaaatgtagattttcctacgtttggtcttccaataatggatacaaatcctgatttaaagctttcgttcgtcatgtaaatcctccgatgaaaatgcgcctggcaataattcttccacagtcatttcttttatttgtccttgtaaattagtcagtacgacaataacgtcttttgtgcaaagctcagaaatcacctgtcggcaggctccgcacggagatactggtccaggggtgtcagccgcaacggccagcatctgaaactctgtatccccttcagaaacagctttaaataaagcggtacgctcggcgcaattgcacatgctgtatgccgcgttctcaatattgcagcctctgtacacttttccatccttggtaagaagagcggctcctacttggaatttggaatacggcgcatatgccatatcacgcgcttttaaagcttctgttattaattcttgtctgttcatgtgtacattcctctcttacctataatggtaccgctatcactttatattttacataatcgcgcgctttttttcacgcccatttctaaaaatgtaaaataaatgtaagaattttcagccattacagctttggcaaaaaaataagtaaaccaatgatacacgaaatcacggcaaaaacgcaaacagccccggcggcagcgtccttggccgctttagcaagagggtgatgtttgtcagttattaaatcaaccgtatgttcaatggctgtatttaaaagttcaagcgaaaacataccacctatcaaaaggaatataatcatccactcaataatgctgagctctacaaggaagccgcaaatgagaacagcgcaggcggctgcggcatgaaattggaaattccgctccgtccgcgctgtttcccatatgccccggcctgcatgcacgaagcttttgaagaatcgattcagctcatttctatgatcttttgagtccataagcgtccagcaattccttttgcttagtaaacatctcctcttcttcctctttcgtcatatggtcatatcctaaaaggtgcagaaatccgtgtacagctagaaatccgagctctcttttaaaagaatgattatactcctctgcctgctctcttgtgcgatcggcactgatgataatatcacctaaaaccggaggcatttcggcgcccacgatttcgatctcgccttctccctcttcttcaagagcaaatgagatgacatctgtcggagcatcctttccccggtattctttgttaatctgatgtatgtcatcattggaaacaatcgtgacagaaacttcagcctgatcctgaacgccttcacgctcagcggcaaattgaagcagattttctacttctttgagcatctcttctgagacgcttcccgtttcatcaacgatatcaatcagtaaactcatctatttcaccttcttagtagcctccggatattcaatccgggagtggaaaattccttttaatgttgcacagagcgtttttgcgattgtatccagctctttaaatgtcaaatcgcattcactgaactgtccgtcctgaagcttatcggatataataccccggacaagcttttcaattcgttcaggatttggattgtgcatggatctgacggccgcttcaacactgtcggccactgatataattgcggcttcctttgactgcggcttcggtcccggataacggaactcttcctctgtaatctggtcgcctttttccttcgctttatagtaaaaaaactttaaaagcgaggttccatgatgctgctcagcaatatcgacaagctctttcggaaatttatagcttctcagcatattcgcaccgtctgtcgtatgcgagataataatatttttgctcaactgaggtgacagcttgtcatgcggattgtcaatattcatttggttttcaataaaatattgcgggcgctttgtttttccgagatcgtgataatatgcgccgactcttgcaagcaaaccattagccccaaccgcttcacaggctgcctctgataaattggcaaccattacactgtgatgatatgtacctggtgtttccgtcagtattttgcgcaatagcggatggttaggattagacagctcgagcagcctcatggtggataaaatgccaaagcccgtctcaaaaaacggcatcagaccgatgatcaatacagatgaagcaaaccccgacacaacccccatgagcattaacgtgccgatttcaagacccgacagcgcagtgttctggatcaataataaggatagaacgacaaccatattaataaacgccacgaaaagtccggtctgcaaaatctttgatcttgcattgtgttttcctaaaaataatacacctgaaatgccgctgatcaaataataaatccctatgacataattgaatgttcctgtcacaccctgattaaacatcatacttccgcaaatcgcaagaatgatacttcccaaaatggcaatgcgttcattcatcagcagtttgattaagatggcgccggccgcaatggggaccagatagccgatattattatactccatcttctgaaacaaactgacaacctccatgatcacaagcaaaagtgttgtgattatggagaataacagaatggattggtttttaaacttcagattttgtttctgtttttcaaaataatatacaagtgttgcaatgaaaagtccgatcataatcaatagcccgctgatcggtttaaagagatttgagttatttaataacccggtcagctcaagtttcctgtacacttcccgatcaatgaggtcattttcttccacgagcacttgcccctgtttgatttgaacctgctggacattatctgaggcttcctgccgttttgcctctgttgctttcggatcgaagacgtaattcggaataatagcaaaacgcccgatttctgtcgcggctcccaagtatttagacggaatagaattgctctttagctctttttctaccttatcctttgcatcagatagtttatccgaagggatttcactgctcatgaccgtatttaccgcggtaatgaccgtatctctgacaaaagaaaagtcttcactgtctgctttcagcaatgtcttgatggaatcctccgatatagaatcattcacatctgatgtcaatttgtcctttacagatttgaccattgatttttccgatggtgatttactgccttcttccgatgattttttcacttcactaatactgtcgaatattgatgacacaaggtcaatccgattgtctgtatattctttttttaatgtatattgatcttcaaccgcgtcctcagcggcttgctttttttcctctgtggctttttgatcttctacggttgccggagcgtaaatggtcttgtcgctgactgaaaacaggtctaaatcaagtgtttccggcttaacatgtacaaagagcaaagcaaacataatggcagccagcagaagatacagcagtacatgcatggagcgggcatttttaaaactgctccatttttttgagctgcttttggtcttagccttctttttcaacacaagaacctcctcttgaaacatcaagcccataagcaatcataaaaatgacccgataacgcgcgatcgggtcattcagcattaattttgcttatcgtatgcttcaataattttcgcaacaagcggatgtctgaccacgtctgtctggtctagctcaatcatagaaatgccgtctattcctttcagcatctccttcgctactgcaagtcccgatttgacgcctttcggcagatcaatttggctaacgtcacctgtaatgatcattttagagccaaaacccagtctcgtcaaaaacattttcatttgagcaggcgtggtattctgtgcttcatcaagtataacataagcatcatcgagcgtccgtcccctcatatatgcgagcggagcaatttcaatgatgcctctttccatcagacgttctgtatgatctgccccaagcacatcatggagagcgtcatacagcgggcgcaaataaggatctactttttcttttaggtcacctgggagaaaaccaaggctttcaccggcttccacggcaggtcttgttaaaatgatttttttgatatgtccgttttttaaagcatggactgcttttacgacagccaggtacgttttcccggttcccgccggaccaatgccgaatacaaggtcattccgcttcatagcggccacgtattcccgctgtcccattgtttttacacggattgatttgccttttgcgttttttgtaatttcttcttcatacatgctttcaaagtattcaagttcattcttctttgccattttgatggcgtaaatcacatcacgttcagagatctctatccccttgcgaattaaagcgaggagcgatcccagcagcctgtctgcaatctgaaacgattcatcatcgcctgaaacataaatcgtctcgccgcgcgtaatgatatttaaattcagatctttctccatcaatttcaaaaaagaatcttggttcccgaagagtgaaagcgcctcgtccgggtttttcagtttttgattcatcgcaagtaaatgttctgtcattcttcagtctccctgacaataggtgtggtttgaacgatatcttctataacttggtagagaataatcaactttactttaccattctcaacagtctggtgcaaaactttttcacttttcacctcgccgttttcgcctattttatcctctacatcctgtttacccaatttaatgccttcttgaactgcttcttcttttgtatattttcgcaaagcctcttcactttctctcgtttgctctttgacataggatacagggagcttaaatccgagaaaatgaagcgaatgcttttcttgttctgtttttggatgcttcaattcctcttttttaaacgtcatcccccagatcgggattgccaaagaaccaaaagaaagcttgtgctttgtccttactttgcccgtatagacgttaaataatgtttcaagcgggactgtcacttctgatctataccaggtttctccataaatttctgcttttgaggcgacttcctgctgatggtcttcgctgccgatcagtcccgaaacaagcagctgtcccttttcaacatgatcgtgtatggcggccatgggctgtcctttttgcacaaacattctcgtaatggttgctttctttttggcgacaatattgcgcgggctaacatatttttctttttcgggctcatttttctccacaactttcatatgaatggtcgtccccttcagatcaactccgacccaagtgatattgtctattccattggttaatgatttctgtattttttcgggcgacatcattaaaaactgcagacggccctttttgacgccgatttcattaagatgctgcctcatttgatgttctgtttcaggcttagcgcctgtcacatcaattttccacaccatattggacagcaaaaacaaaagaatgaaaaaaatcgcaaaaccgatcgtaaaccctatattcagctttgatttcagcaacaggaagggaaatcccttccgattgataaatcgggctttacatttaaatttacttcttacccgccgaaaggcatgtacatcctgaagctgtatatataacgatacggcttctttcttttttttgacatgaaagaccggaatcccctgtcttgtgcattcattaaggagccgctcaatccctcttcccgtcaattcaagctggaccttacccgaaaaaaaagacagccatttatttttcacaacatttccccctcggctttatgactcaacatatcgaacgacatcaatcgtaccctccaaaagtatctcttccggaagaatcgccttgatgacaaaatttttaccagatatgatgcactggccctgcttcagcatcagccgcacttcattctcactgaaaagcaaaaggcctctgtggttttctatgtagatatgaagtctgccaaccattgtaatcctcggcagatccatcataacgtccgggggaatttccaatgctcttgtcagccaagctttcatacgattctttctttgccccatacaaaaagaaccccctttcatctcatatgtatgatttgaaaggaggttctaacactttaatttttacgggccgggcgcatcgtacggtgaggttttttcgcccgtggaggtccgaacacctctcctagaacgatcccctgtacgacggtgtctttattcacctgaagcattttttgttttgtgtatactgttttttgtttggcagcagcaagatctcgttccagccctttcaggtttcttgctgtttccctgcgtctttcttccgcttcccgtcttgcctgttccatacggttagggataggtgcaggggcatcttcttttgactgcttcttttgaggagaagcagattgcacgtgttgaggtttttttcttttttggctgttttgcttttcttctttgctctttttgccgaaaatcgcagaaatgattccgatgatcgctgcaataataagcggattggtcagtaaatcttccatcagcgttctcccttcttagagagattatgatttgcggtcttcatccgaagggtctttcgtcagcttgccgaatgaatcacgcatttctgtgtcagcatcgatgttcttgatattcatgtaatccatgacgccaatattcccttcacgcaaagcttctgccatcgcaagcggcacttccgcctcggcttctactactttcgcgcgcatttcttctacgcgggcacgcatttcctgttcttgagcgacagccatcgcacgtcgttcttccgcttttgcctgcgcgatgtttttatcagcctcggcctgatcggtttgtaaaattgccccgatgtttttgccgatatctacatctgcaatatcaattgagagaatttcaaacgcagttcctgagtccaatccttttccaaggactgtctgagaaatcatgtcagggttttcaagcacttttttatgattatcagatgaaccgattgtagaaacgattccctcacctacacgagctacaatggtttcttcccctgctccccgacgaggcgctcgatattcgctcttactgtgattctcgctttcgctttcacttcaatcccgtccattgcgacgccggcaatgaacggtgtttcaatcaccttaggattaacgctcatttgaacagcttccaacacgtcccggcctgcaagatcaatggcagcacagcgctcgaatgtgagttcaatgttagctcgctgagcggcgataagcgcgttgacgactctgtcaacattacctccagccagatagtggctttcaagctggtttgttccaacattaagtcccgctttatgcgctttaatcagcgggttaacaacccgattcggaatgacgcggcgaagcctcatcccaactagagtgaaaatgctgattttcactccggctgccaaagctgaaatccaaagcattacaggcacaaatgtaaaaaatactgccaaaacaatgatcgctactgcgacaattgccagaatcataagtgttgacggatccatataacttctcctcgtttctatttaaatttctctcacgacaatgcgtgagccttctacttttatcacttttacttttttatctttttctgtaaacgatccctccgatacaacgtcaaggcgttcatcatcaataatcacggtaccggaaggacgcagcggtgtaaaggttatacccacttttcccattaagtccgtgcgcgtttgatttgaaacgtagccgctctccgtgtttgtagaatcatttaatatcaatttcttaaagaatttcatacgctttcccaacacccttgtcagtaaaataaaagctgtaatcgaaacagctgaggcgatcaagagagaaaccgccatgacagtgaagctccccgcggctaaaaacaggctcgcaataatcgctcccaagcccagtaatccaatgattcctccgggaagaaaaatctcaagcagaatgagaatcacccctgctataaagaggagaaccgtctcatacccggcaaggccggctgcaagatgcccgtaaaagaacagcaataacgcaatgagtccagccgttccagggaggccgacacccggggaaaaaagctctaccgtcagacctaaaaaagcgattgtcagcagaatagggacaatgaccggattcgtcagccatcttgccgtcttttccgcaaagctctcctttgcatagctgatctgcgccttttcgaacccaagcttctttacgagcgtggacaaattgtcagcagtgccttctgaatagcctacctcaatcgccttgtctgcgttaagtgtcagcagatctcccttaggcgcgccaacttccttggcatctatatctgggtcagccattgcgagcgcatattttggatcgcggttatttttcactgcggcatcttccatctctgccagccaaagtgattgagctttttggtcagcggcattgccttggccatcaacaatcgcggcggctcccatttttccgccaggcgccatataaatgtgatctgcttgaagtgcaatatatgcaccagcagacaacgcgcgtttgttgacatatgcagttacggggatctcgctttcggttatcaaatcggccatatcaatagcagatttgaccaatccccccggggtattgatatcaagaataatatggtctgcatgtgcatcctttgcgtcttgtaacgaacgggacaaaaacgaggcgagaccctgttcgacatttttttcaaccgggatcacataaacagtttgtttttctgcttttgcgttcagctgtacgcctaataaagaaagtaaaaatatacccaaaagagcagcacggaatcctttgatttgaagcaagggcggtgtatccctccttccttttataataagtgccttctcttcatacgtaacaaatgtatcaaaggtttcatttttttatgtataaaaaaagacatctctcttagaaagatgtccttttctttgccatttaagacagttgactgctcacaagcttattaattaaacttccgtcagctttaccttttactttaggcataattgcccccatcactttgcccatgtccgcttttgagctcgcaccgacctccgcgatggtttcatttacgattgtacgcagctcttcttctgacagctgctcaggtaaataaacttctaaaatgtccagctctttttgaactttatctactaaatctaaacgattagcgtttgaaaattcctggagggagtctttacgttgcttaagttcacgagaaaggacagtgagttcctcatcctcggtcaaactgtctttcttaagcttaattgcttcattttgaagtgaagccttaaccattcgaacgacagtcagtttgtctttctcacggtttttcatatacagcttcatatcctggttgagacgctcaagaagactcataaatccaccctcttttagaatttgcgttttctagcagcttcagactttttcttgcgctttacgctaggtttttcataaaattcacgctttcttgcttcttgcaaagtacctgtctttgatacactgcgtttgaagcgacgaagagcatcttcaagcgattcgttttttctaacgaccgtttttgacattctctttccctccctccgaatacaccaatcgactacctttaagttacacatataaacatgtactttgacattataatataagccatcagtcaggtcaactaagtgagttcacttttccgtcatgagtgcgactgcctgtctatataatgaaagaaaggggttggtgaataggatgttaattctgattagctttactgctcttatattattctttctcgcaggcatgaacatgcttcgaaagggcttaatttcaatggcgtactcaaaaattgaagaacgtttgcttttatttacagaccatccgttaaaagcgtttcttatcagtattgtatttacggggatacttcagagcagctcagcctttatggtcattgtcatcggctttgtaagtgcgggcgttctttcttttaagcggacgatcccgatgattctggggacaaatgttggctctacttttacaactgaatttattgctatcaaaatggatattgtgatttgggttcttttaataggaggtttattgttttttctgactggcaggtatcctttgaaacagctgggaacaagcttccttggactgggcatcatcttcttttgcatcagcggattcagccatcttgccgggccgctgacaaagctgaaaacgggcgccgacgttctataccatgttaacgattcaaactggtccgctttgctcatcggcatggtgttaactgccatcattcactccagttctgtctgtatcggcattttgatgagttttatgaatgaagggattatcggactgacacaggcgatgagcgtcgtactcggatcaaatatcgggacatgcattacagctgtcatggctgctgtatccggcggatatgcggcgaaacagacagcatatgcccatgtggtatttaacgtgctaggggtggctctagtattgccttttctgaccgcagcgaccggctttgtagagcagttatcacctgatcccgcacaaaagatcgcgcatttcagccttttatttaatgtggtgacagctcttttatttcttccgcttacaaacttgttttaccgattgattcaccttcttatcccggctaaataaaaaaatcggtacattttaatgcaccgattttttaggttaagaagacaaacgcatgtgttcagttatttcatcctcaaccacacggacaaactgtccttcgttgtaaggataacctgcttttaggattttgacttttacgattttgccgatcatatcttccgtacctttgaaaacaaccttcatataattgtctgtgtaaccgacaaacatattttcttcttctgtttccttaaacgcttcctcagggataatctcaagcacttcattttcatactgagaagcgtattcttttgcaagctggtcagaaagagcaatcaggcggtgcacacgttcgtttttcacgttttcatccacttggtcttccattcgtgcagctggtgttcctgtacgcttactgtaagggaaaacatgcagctcagagaatttatgttctttaataaagttataggtttccataaattcttcttctgtttctccagggaacccgacgatgacatcagaagtaacagctaagcctggcagtgcttttttcaatttatttaaacggtctgcaaagaattccattgtatatttgcgtctcatccgtttaagcactgtgtttgatccggattggataggaatatgcaaatgattcactatcttatctgagcggtctaagacctcgatcacttcgtcagtgatttggctggcttcgattgaagaaattctgatccgtttcacgccttccacacgggtgtctaattcgctcaaaagcttcgcgaagttgtaatctttcatatcttcgccgtagccgcctgtatgaatacccgtaagaacaatttccttatatccggcatcgacaagctgctgcgcttgtttaatgacttcttcagggtcgcgggagcggagcaggcctctcgcccacggaatgatacagaatgtgcagaaattattgcagccctcctgtattttcaatgacgctcttgtgcggtccgtgaaagcaggcacatcaagctcttcatatactcttgctttcatgatgttgctgacgccattaatcggctggcgttcttctcggtattggtcaatgtagccaagcattttttcacggtcctgtgttccgactacaatgtcgacaccggggatcgccataatctcagcaggtgaggtttgcgcgtagcagcctgtgacacagatgacaccgtcaggattttgacgaatggcgcgtctgatcacttggcggctttttttatctcccgtatttgtaaccgtacatgtattaatgacatatacatcagctgtttgttcaaagtctcttctttcatagcccgcttctttgaaaagctgccagattgcttctgtttcataatggttgactttacagccaagcgtatggaaagcaacagttgccattactgatcacctcttaataactctgtttgataagaaatcgcactcaacgcgtatagcggagcggtttctgtccttaaaattctcggtccaaggccgcacgtcacaccgtcttgctctgtgagccgttcaacctccgcttctgttaaaccgccttcgggaccaaatacgatcaatagagatgatcctttcggaaggctgcttacaatcgcgctgaatgcgcttatttccccttgcttcgatgactcctcgtatgcaacgacacatttatcgaaatcctgcatcctttgaagaagctgctgaaaagaatggacatccatcactcgcggcacttcgttacggtacgattgctcagccgcttccttcgcaattttcgtccatctttcccgctttttctttgcctttttgtcatccagcttgacaacagaacgcgcggcttggaaaggaataaaggcatgagctccgagctcagtccccttttggataatccattcaagcttatctcctttcggaaggccgctcgcaatatagacctttatcggaagctctctgttttcattcgtccattctatcacaaggcaggacactttatctttggaaacagattgaagttcacattttgcctcgaagccgtcttgagagcagcagataatctgatctccctcattcattctcatcacgttcacaatatgatgaacttcttcgccggtaatcgaaaaagtcggcgcttcctctatttgctgcttcgtgagctcgataaaatatcgttgcatacgctgtgacacctactaactgttattttttcgcaataatgctgacccaatcttccattgaaaggatttctacaatggtaaagccagcttgttccagtgcttcttttacttcttgttttttatgaccgatgattcctgacgtaataaagtgaccgccttcttttaacaggctgtacgcttgtgaagtaaagcgaagaatgacttcagccaaaatgttggccacaatcacatcatgttccccttcaatcccgtctaacaaattgttttgcttcacttgagcaatatcgctgactttgttcagcttgagattgaggcgtgcactttctacagccacgggatcaagatcgtaggcatgaaccgattcagcctcaagcattgcagccgcaatacttaaaattcccgaaccagtgccgacatcaatcaccttatcacccttttgcacaaagcgttcaagcgcctgaatgcagagtacggttgtcggatgtgtccctgtgccgaaagccattcccgggtccatttcaataatcagttcatcagtatggaccggcgtatattcctcccacgtcggcacaattgtaaacttttcagaaattttcacaggatgataatactttttccaggcagtcgcccactcttcttcatttacttcagaaatagtgatgtggtttctgcccaaatcaatattgtaaagaaggagattattaatcgtttctttgatgccgtctacagtttcgcccagaaaactgttaaccggcagatatgctttgacaatgacaccctcatctgggtaatcattggggtcgagctggtagatttccccgtacacattctcacgttctttaattaaatcaagcgggtcctctatcacaaccccacttgcaccagcttcatgcaatatatttgagataggttcgaccgcttcatgtgttgtgtgaatgcttaattcggaccatttcaaaactaccaactcctcatccaataattaatcgcctttaaacgcgcgttttaccttgtcaaagaaactcatttcctgttcgtcaggcaggtttccgctgacttcggcaaattcgcggataatgtctttttgtttatcagtcagatttgtcggcgtaacgacgcggacgacgatatgctggtcaccctgtccatagcctctgacattttgaacgcctttgcctcttaatctgaatttcgttcctgtttgtgtaccggccggaattttcaatttcacttttccatgcagcgtcggcacttctacctcatctccaagagcagcctgagcaaacgttaacggcatttcacagtaaatatcatcgccgtcacgctcgaagaactcgtgtgcgcgtacatggaacacgacaaataaatccccggcagggccgccgtttattcctggttcaccctgtcccgagagacgaagctgctgcccgtcatctacaccggctggaattgtcacattgattttcttgcgttttttgatttttcctttgccgccgcagtccgcacatttgtttttaatgattttgcctgtaccttcacagtggtggcagacccgtctgttaacgacttttccaaacggtgtattttgctccacgtttaactggccggagcctccgcagtgggagcatgtttctggatttgttccaggtttcgcacctgagcctttacatgtttcgcacgtttcctcgcggggaatttcgatggttgtttctttaccgaaagccgcatcctcaaacgacagggtcatcgtatactgtaaatcagcaccctggcgcggagcgtttggatctcttcgtcttgtgcctccgccgaatatacttgagaaaatatcatcgaaaccaaaaccgccgaaatcgccgccgccaaaacctccgccgccgaagccttggttagggtcagtgtgaccaaattgatcgtaatgcgcacgtttttggtcatctgacagcgtttcgtatgcttcttttacctctttaaatttttcatctgatccggcttctttgttaatatcaggatgatatttttttgacagcttccgataagcttttttaatttcatcctttgaagcgctcttacttactcccagcacttcatagtaatcacgcttactcatctcgcttcactctcccgaatttctcacataaattagattgtatcattttgaattatgatttttcaattccttttatcccgggcaagaaaaaaagtcaaagccaagagatgcctgactttgactttctaatcattgaatcagattatgaaatgtgttcttttcggtcagctccggaagcggggctgacactaaaaagaacttattttttgttttggtcgtcgtttacttcttcgtattcagcgtcgacaacgttgtcatccgctttgccttcagcgtttgctccgccttgagcttgctgtgctttagcagcttcttcataaagcttcatagaaagctcttgaacgattgtttgaagctcatcttttttcgctttgatctcttcaaattcgtttttctcaatcgctgcttttaaagcgtctttggcatcgttggcttttttcacttgttcttcgtccactttgccttcaagatcttttaatgttttctcagtttggaaaacaagctgatctgcttcgttgcggacttcgatttcttcttttttcttcgcatcagcgtcagcattttcttccgcttcttttaccatgcgttcgatctcttcatctgagagacctgaagaagatttgattgtaatgttttgttcttttcctgtgcctaagtcttttgctcttacgtttacgataccgtttttgtcaatatcgaaagaaacttcgatttgaggcacgccgcgcggtgctggcgggatatcagtaagctggaagcggccgagtgttttgttgtcggcagacattgggcgctcaccttgaagaacatggatatcaacagctgtttggttatcagcagcagttgagaacacttgagatttgcttgttgggatcgtcgtgttgcggtcgatcagttttgtaaacacaccgcccattgtttcgataccgagagaaagcggtgtaacgtcaagaagaacaacatcttttacgtcacctgtgataacgccgccctgaatcgcagcaccaagcgctacaacttcatccgggtttacgcctttatgcgcttcttttccagtttcttttttgattgcttcttgtacggcagggatacgagttgatccgccgacaaggatgactttgtcgatttcgcttgcagaaagtcctgcatcttgaagcgcttgacggacaggacccattgtgcgctctactaaatgagaagaaagctcttcgaatttagcgcgagttaatgtaagttcaaggtgaagcggtcctgcttctccagctgtgataaacggtaaagaaatttgcgtagaagatacgccggaaagatcttttttcgctttttcagctgcgtctttcaaacgctgaagcgccattttgtcttttgacaaatcaatgccgttttcttttttgaattcagacaccagatgatcgatgataacttggtcaaaatcgtccccacccagacggttgtcgccggcagttgaacgaacttcgaatacaccgtcgccaagctcaaggatggaaacgtcgaatgtaccgccgccaaggtcgtatactaggatcgtttgatcttcatctgttttatcaagtccgtatgcaagcgctgctgcagtcggctcgttgatgatacgttctacttcaagacctgcaattttaccagcgtcttttgttgcttgacgctcagcatcgttaaagtatgcaggaactgtgataactgcttttgatactgtttcgccaagatagctttcagcgtatgatttaaggtgttgaaggatgatagcagacacttcttgtggagtgtaatcctttccttcaatttcaactttataatcagtacccatatgacgtttgatagacataattgtgttagggtttgtaatagattggcgtttagccacttcccctacttgacgttcgccgtttttaaatgcaacaactgatggcgttgtgcggtttccttcagcgttagcaataactttaggctcgccgccttcaagcactgccacacatgagtttgttgttcctaagtcgattccgataactttactcacttgaataacctcctgctatgtaattattgattcactttgaccatggaagggcgaatgacgcgatccttcagcttatagcctttttgcatttcctcaacaacaatgttggagccgtagttttcgtcttcagcctgcataacagcttggtgcagattaggatcaaattcctgccctacagcttcgatggcttcgacgccttcttttttcaaggcttctacgagctgacggtggaccatttccattccctggagcaaacttttcgtctgttcattgtcggcttcaacctgaagcgctcgttcaaaactgtcaagagccggcagcaaatcagtcacgatattttgagaacggtatttttgggacgcttccatctctaaacggctgcgtcgtttatagttttcaaagtctgcttgaacacgcaaaagtttgttttctttttcctcaagcaaaccttgcaattcgttaatttggttttgaagaagttcgctttcatttgtttcttcctgctgttcatcagcggcagcttgttcttcaatgatttcttgctcttctgtttcgttttgttcaacggtttgtttttcttctgacattgtgttcacctccctcaaagtgtaaggagaaggacaggtgctgcccttcgataaaatttgccaaaattcccttattcatcatacagacttgttaatgcttttgacaagtccgaagtcacatgctgaagcaggctgacaaccctggaataattcatgcgggtcgggccgataatcgcaattgagccgatctgcttctggtctacggaataagaagccgtaatcagactgcaattttccatctcttcatagtcgttttcttttccgattttaatcgaaattcccgtgtgcggggattgaaccagctttaaaacatcctgttctttctcaattaatgaaagcagcgaccgaactcgggtgatatcatggaactcaggctggttcagcatattgattttcccgccaaaaaacaacttttcaacgtgatttgtggaatgaaaggttgaacgaagcgcgtcgagtatattgtcatagtttttaatgtgctgtcttaggtacatgacaacttctttaaatatgcgctcattcagttcatccattggaacgccgcttaaacggtcgttcagtatatttaccagtttttcaatatcagacagatccattttggtcggaaagttaatcgttttgttttccacatgccccgtattggtaacgagaatcgctaccgccatatcaggctgaatcggaatgatttgaatctgtttaaggtaattctcactcaacttcggcccgagtacgatggatgtgtaattcgtcagatcggacaaaatttgcgctgatttttgaactgtcttctccagctcgaaaattttctctttgaagatcgagtggatttggtccaggtcgcttttcgtcaatttgacgggtgacagcaaatggtcaacatagtaccgataccctttttctgacggaacacgtcctgaggatgaatgggttttttcaataaagcccaattcctccaagtcagccatctcgtttcttattgttgcagagctaaatgtgatttcatcttttttcgaaagagttcttgatcccaccggctgtgccgatttaataaaatcgttgattataacctgaaggatcagcagctgacgatttgttaacatcatcatcacctctgttagcactctcaataagcgagtgctaattctataacaaaagtatcaaaccacaagaaaaatgtcaattataactcacccaaaaaagcgccaaaaacttcattgcctaataatttcccttgatgagtcaaataaacggcagactccgaattgtgaatcagccctttttcagcgaggtcttttaacacgcttgggaaaagtccatccagggaacggccgtatttttctgcgaatcgttttttgctgacaccggctgtttttctcaaacctaaaaacatttcttcctcaatctgttcttctgttgtcacttcatgtgtatctctgtacggaaaacccttttcagctatcaggtcaatgtaatgcttaacaggtccgacgttcactgttcgtgtgccgccaatatatccgtgagcgccagctccgaaaccgaaatattgttcgttgctccaatacgttagattgtgcttagattccatgcctgccttagcaaagttgctgatttcatattgatgaatgccgtgagcttccatcttgctcatcactatttcatacatttcagcttcctgctcctgcggcggaagatgaagccgccctttttgcatcaaattataaaataccgttttcggttctacaataagggagtaaacggaataatgctcagcgtccaatgataaagcagtgtttatggaatgttccagatgcttgagggtttgccccggaagcccgaacatgagatcaagactgatattctcaaaaccgatttcccgcgctctttcaaaagaggtgaatacatctttttgcttgtgcactcggccgattttttctaacagatcgtcttcgaacgtttgcacaccaaagctaaggcgatttacgcctgcttcttttaatatttttaatttctctgcggacaaatcgtccggattcgcttcaaccgcaaattccgataagtcgcttgagggctttagcacgcggttgatcatatccatcagctttttaagctgttcctcagacagggaggtcggcgtgcctcctccgataaagattgttttgagatcaggctgcccggtttttgctattgtatttatcatttcctgttcgagtgcgtttaaatactcgtcgactggctgactttgaataaaatatttattgaaatcgcagtagtggcaaatatgctcacaaaatgggatatggatataagctgatttcaacggattcaccttctttacagaaagaagccgcagtacaagactgcggcggcttctattgttttttcggactgtcgtccattttcagaactgccataaatgcttcttgcggcacttcaactgagccgacctgcttcatacggcgctttccttctttttgtttttcaagaagtttccgtttacgcgagatgtcccctccgtaacatttagccaatacgtttttacgcattgcttttatggtggagcgggccacgattttctggccgattgcggcttgtaccggaacttcaaactgctggcgcggaatgagttctttcagtttttcaacgatcacttttccccgttcatatgcgtaatcacgatgcacgataaaggaaagggcatcgattttttcaccattcagcataatgtccattttcacaagcttggacggtttgtagccgatcagttcataatcaaaggacgcatagcctttagtgcttgatttcagctgatcaaaaaactcatatacgatttccgctaatggcatatcataaatgatgctgacacggtttgcgtctaaatactgcatatcaatgaaattgccgcgttttccttggcaaagctccattacagcgccgacatagtcattcggcaccatcatcgtcgcttttacgtatggctcctcaaccctttcgatcttttgaggatccggcatgttggacgggttgtcgacaacgaccttttcgccgtctgtcatatacacgtcatagataacgcttggcgctgtcgtaatcaggtcgatgttgaactcacgctcaattcgctcctgaatgatctccatgtgaagcatgcctaaaaatccgcagcggaacccgaatccaagcgcttgcgaagtttccgcttcatattgaagggaggaatcattcagctcaagcttttcaagagcttcccttaaatcattatacttcgctgtatcaatcggatacaaaccacagtacaccatcgggtttagcttgcggtatcccggcagcgcttcttctgcaggattggcagcgctcgttattgtatcaccgacacgtgtgtcaccaacatttttgattgaggcagtcaggaagcctacatcaccgaccgtcagttcatttgtcggagttgctttcggcgtgaacacgcccacctctgttacttcgaattctttgccggttgccatcattttgattttttgtcccggctttaccgttccttcaacgactctgatataagccacgacaccgcggtaggcgtcataaagcgagtcgaagatcagcgctttgagcggcgcctccggatctccggtcggagctggcaccttttctacgatttgttctaaaatctcctcaatcccgataccggcttttgctgaagcaagcacggcttctgatgcgtcaaggccgataacgtcttctacctcttggcgcacacgttcgggctcggcgctcggaaggtcgattttattgatgaccggaaggatttcaagatcgttgtcaagcgctaagtagacattggcgagcgtctgcgcttcaatcccctgggctgcatccacgacaagaatcgctccctcgcaggcagcaaggcttcgggatacttcatacgtgaagtcgacgtgtcccggcgtatcgattagatgaaagatatattcttctccgtcttttgctttatatttaagctgaacagagtttaatttaatggttatgccccgctcacgttcaagatccatagaatcgagcaattgttctttcatttctcgttgagtgattgccgacgttttttctaaaatacgatccgctaaggtcgattttccgtggtcaatatgggcaatgatagagaaattccgtattctcgattgcctctctaaacgcttttctttatctgtcacaatctatcactcctactattaaacgcaaaatacactagcttagattatatcaataggattgtaaagattcaatgtaaaacaagaaagagaaaagttccctatcatatctgggttgcttttctctttcacgtacttattgattcatatcccgtatccattcatacattgactgggcagtattggttacggtgtccgaaagcgcttttccggcttttgaaaacatattgaatgtctccaccttttccagctctttttgtttttctactaaatcttttgccgtgactgtttctcctaggattgaggcttctttttcattatcttttccgtcggtgagcgtaaacgcccccttcagtgaagggtcatgatagcctttcatactcagcatcccgtggtttgcctgctgcatgccgaacagaacgcctaaaaacatgatcgtgacaagcagtaagcactttccaaagtatgcaatcaaatcaaccacctatttcttattgttttttcgtctccccgctcgctgcgttgaccttttcagcatcccagtacatttcgctgaatacgtccgcggccgcgttagccgcacgctgcagctcttcgagattattatccactccgccaaactcgagcaaaagcgctctatcggttaaatcctgattgtaaacaccattatcgcctggcgagcctttggaaaagacacctgtgctaagtccggggtattttttctccatcagtttatgaagctcactcgcaattttatagttttcttcgaagtttttgctttttttcccgacgacaaaggctaccctggcatagcttttccctttaatcgttgcggttgtgtcttttttgcgccgagagtctctgtggatgtcaatgatatattgcagatttttgtttgaagcgagggcgtctttcacgaccggccttgattcatcataggacctggcatagtttaagccttttttattcaattttgactgtatatcggttttattcactgtggctccgattccctgggattcaagcgcttgtccgaacatatctcctacaagcgtgacattggctttagaatggcgcgccatgtcaggatcggtctcgccttttaatagagggagatatgattccgtattgtgcgtgtgatagataaacacgacctttttatcacctgttgtttgtttcggcggatctttttgcgcattatctgattgcgtttgctgtttttcaatctctgccaaattcgcttctctttcttcctccatcaccttagacggcggcggcgattccgcaggcatattcgtataatccgttccttgtccagctaacaaaatctcggtatcaaattgtgcaaatcctggcagctcccgaccgagaaagctccgcggatcttcgaggttaatgctcgtcgccagctttaaagaaagacgagaaagatgaaatgagctgtctgtttgagagaggtcagaagcgaaataatggttttccatctgcagcaaatgtgcaaatacgtcacccggcaattcttcagcaatcccataaaaagagtcagacgacggcctaagttccggccggagagacgtcagcacaccggatagaacaaaaatcacgataaggcttacgataaatagaaagatggcttttaccgctttccctccatttaccgcaacaacaatctgtctgtttctgcgtttatttctcattgaatccctccagcgcttgtctagtaattactctatgaacaagctagaggaagtagaactgtttagtgattgtaggagcctttgttttcttgtgacactttttcatgaagcgctgtgtttaatccgttcgctaaaacatttgccatatcgtcgataaatgaatcgacttccttcggtgtaaccattaagttgtgccctaaaggcgaaagcacctcgtgaatgagctgccgtttttcatcttcttgaagggttccgacaatacctaggaacgattggcgctgcttttgatcgggaagatcgtcttcagtgagcactttctttttcccaaacgtcatgcctgccggaacaagcgatcttgatggcctgttatccttcatttctctgccaaaatgttttaatatgtagtccaccgtgtcgctggcaattgtcacggcatcaactactgtcggaacaccgatagcaatcaccggaacaccaagcgtgtctttgcttaaatcttttcgtttattccccactccagaccccgggtgaatgcctgtatccgatatttgaatggttgtgttgaccctttccaccgcccgcgccgccaacgcatcaatggcgatgacaaaatcaggcttcgattgctcaatcacacctttaataatgtcacttgtttcgattcctgttatccccattacacccggtgcaaaagcactgacaggcctgtaaccctcctgtacgttttccggctgaagcttaaacaagtgccttgttaccaacagattttctactgccatcggtccaagcgcatcaggtgtcacgttccagttgccgagcccaacgatcaaacagctcgcatcttttgagatattaaggttttcaagaaaagctgagaattcctccgcaaagacagcagagaccttctcctgcatttccgaatcattctccctgattccctgtgcttcaagcgttaaatagcgcccttctttttttcccgaaagctctgcgccttcctttgtaacatcaactgtgcggattttaatgccgccgtgatcacgctctttttcaataaagcctttaatttcttttgtcggcacagcctgctgattggccattgcttccttcgtttccactgccaaatcggtccgtatcaaatactgattcacatccagctcactctttttcatacaggggcctccttcacattaagtacctatattgttgccatttgctgaataaatcatgctaaaaagagaaccttcaatgaaaaatactttacatttatattgcaatctaaaggtgtgtttgatagaatacaatttgttctattgtgaagaagatttaaccttaagacactgtgctacaggttgtatcttaggaggtgaaacacatgccaaacattaaatcagcgattaaacgtacaaaaacaaacaacgaacgccgcgttcataacgcgacaatcaaatctgctatgcgtactgcaatcaaacaagttgaagcttctgttgccaacaacgaagctgacaaagcgaaaactgctcttactgaagcagctaaacgtattgataaagcagtgaaaacaggtcttgtacacaaaaataccgcagctcgatacaaatcaagactagcgaaaaaagtgaacggactttctgcataatataaaaacgatcctcaataatggggatcgtttttttcatttctttttaacagctgtaaaaggaacagttcgagcaggagctgcttgtcctttttcccggttttcatctcatagtccatgacggcaagctgttcaataattaaacggagctcctcctctgaaaaaagccttgcttgatccatcgccagctttacccgaaatgggtgaacttttagattagaagcgatttgtttttgtccgtatccctgttccgcgaagtacttcgtctgcagaatcagccggaactgattcgaaataagcgccataattttgatcggttcttcattttgttttagcaaatcataaaaaatttgcagactctctgttcgttttcggttgacgattttattgatcagctcaaaaatattttgttcaaggcttctagcaacaagcatttttacatcatccagcgtaatttcttcacgatctccaataaacgtgcagagcttttgaatctcctgaaaaatcgatgacagatgaccgttcacaagcagaaccaaatgctccgccgcttccgtgccgattgttttctgctctgtttttgcaaggttgacagtaaagtctgtcgtttcctttgcatttaattccttcgcctccatcataaacgcgtgcttctttaacgctttcgtcagcttttttcgctcatcaagcttttcatacggagcaagcaggacaaagactgtgtaaggcgcaggtgattgtatatatgattcaagcgcactgacgttgtgctcaattttttcttttttcttttcacctgttaaaaaatatggatttttcacaatgacaagacgccgctcccccataaacggaaacgtttcagcatctgcaatcgcttgatccagcgggtcctcttccagatcaaaaacggacagattgaaatcctttgtctcctgatcaacgaccgtctgtctgatcctgctgacggtttcttgcagcagatatgtctcttttccgtataaacaataaaccggatggacctctccttttttcaggcttttccacacatcaaataccattgttgtacgacttcctctctttcatcatccccttctatcctaaattgagtttgcaaaatagtaaagaggaagcctgactgctgcttccccatttatattaaacgcctgttcgcaagcccccgggacagcttgtaaaaaggcgataatcaccagaacagaaaacgttaccttagcttctagatttttcaaaacaattccattatacttaagtcagtcaggagggataaagttgaatgattttgaaaaaaacgttcaaagcaaacgaaatgatgctgtagattcagctgttggttttgttgtgtccttcggatttttcgccttcttgtttgtcatggcaacggttattcacctagttggttcataacagcgactgcccgggctgctgatttctcggcagtcttttttagttcgtctctgttatatctgatgtatcatatggaggatagacagaaaaggttccaactctgtttttgtatctatattggatcgttccgttttgatctgttcgcagcacgcggatagaatgtctctgtaatagttgcagaactttttgatgaggatgatggtaccgattgtttttcccggctgagataatggccgttttcggctgaagctgttggatgaattcttcaccggtagagcctttgctcccatggtgccccacctttaacacatctgcttttatattcggaaacacgttcatcacctcttgttccccttctttctccagatcacccgtcaagatccagctcataccgcccgtctccatccacagaacgagagatgaattatttttgcttgccggatcaggtgcttccggtgacagtacatggaactgcaaatcctttatttgcaacacatcgcctcgcttcacctcttcaattgccactccctcttccctggctgcctgcagcactttctcatctttaggttcagaaacgaaccctttcggaatcacgaggcgctttactttatgatgcttcagcagaatctccgcctctccgatatgatcttggtcagcgtgcgtcagaattaaagcgtcaagctgcttgattcccttagcagttaaaaacggaatcagcaccttttcccccagtgaaaacggatgctgtttttcgcgccaaggctctgacgagtaagacaaagtgccgccggtatcaattaagacacgaccccgctgatgcggagcacctacaaacatgctgtcaccctgtccaatatctatcatatccacttctccttcggaactaagacacggatatataaagagcagaaacatcaccgtgcagcaaatgcctccggttaccatcaactgcgacaaggagcgtttttcaatcgccataagcaataggatgatcgtgactgtgaataaaaaaagcaaaacaggtgcaggatgtgcgatcataatcgtgaacacatcaacatctgcaatgtttgtgattaacctattgatccagcttatcaataaatcaaaccagctgaaaaacaatctcccaaacgaagcggaaagacttaatagaagaacacctgctacagctcccggcaaaatacagaaggtataaaatggtaccatcaacatattcatcggtacgctgatgatagaaaactgatgaaaatgatataggagaatcggaagcgagcccagctgagcgatgagtgatacaattgtcagctgccccaaggaggttttaacctgctgaaaaatagaagaggatagaattaaagaaaaactgacggcgaacgatagctgaaaaccggcttcaaagagatgataaggattgaagagcagaaggacgatgtacgaaaggcaaattgcagttgcagagcggacacgccatttgacaagacttccagctaagtaaacacccgacatgagagcggcgcgtagcactgaaggagcagcgccggtcaacatcacatagagcggcagaaataacagcaacagaattgacgccttttctctagttataccaaggcggatcatgatataaaacaaacctgctgtcaaaatccccacgtggagtcctgatattgccaagagatggacaacaccaagcttttgatacgcggtaagcacttcatcctccacgtaaaatctgtcaccaactgtaagtgcctgtacaatccctgtcgaatcaggaggcagaaggctgtttgtgaatgatatgatatgttttctcaagctgagcaccttgtacttgaaattttcaggttcgctgcagttttggatagacgtgacagagtagttccaatgaatatgctgccgataaagatactcgttataatcaaatgcacccggcacagttgcgtgattcggttcttccaatgtaccagtcaactcacatgacattcctggttctatgtataacagctgttctttttcaccagcagactgaatgcgatacgcagcagcccatttttccttatcaggtgtctcaaccatcatagacatacggtcgccgtcaattttgggaatagtgtcaatcactgccttgaattgataggttccctgccgataggaagagacattctgagaatctgtgactgcatacagtacaaaaaacaatataaaagagaagaaacaaacaataataagaaaagcgtgcctcgttttgattaaaatgatgaggagaaagaggatgaaaagaaaaatagcggggaaataagcggcggcagtaattccagccgttgccgaagctgccgccataggcaataataagcgcgaattacgcattcatcacacgtagctcgtgaaaagtgtattcgcctgttcatgtatctttttcaattcttcctccgctaaaccggcatcagccaatttccctattagacccgctacaaatgaaagcttttctctgtttttcagatcaacgatcatttcatcgagttcaacctgttcaacagttacacccgcctgttcaaataattcctgcgcatacggatgtgttttgtaatcctcagcataataaaccgttttgataccagcttgaataatagatttgcagcattgaatgcacggataatgcgtcacataaatctcggctccatcagtcggcaccccaaacttagagcattgaagaatcgcattcatttcagcgtgaatggttcttgcgcaatgatcatctatcattaagcatccttcatctgcacaatgtacgccgcccgcgattgacccattgtagcctcctgctatcatgcgtttgtctctgactatagtagcgccgacagataatctcggacatgtgctgcgcagcgccaataaatggctttgagccataaagtattgattccatgaaattcgttccacgttgttccctccaaatgttgtgttgcctgacctttagtttacctatcataatgcatgaccgtcaaatcactttactgtaatggaagactttattttctcaaatgacttttcacctattcctgaaaccttagtgatatcttcaattgtttggaaacgaccgttttcctcccggtatgcaataatagcttcagctttggatggccccacccctgagatgccttgtaactcctctaaggttgctgtattgatattcaccagcgctcccttccctccatcgctttggacagaccctccgccaccttgctgcactgctgtttcctctccctttttcgggatgtacaccactgtcccgtcctgcagaatctccgccaaatttacttgcgcttcgtctgcttgttcactggtcccgcccgctttctcaattgcctgagatactctgtcccctgttcgcatttcataaacgccaggatgctgaacagcacctttgatgtctatcacaattgtttcgtttgactcgtcgttgtttgcttcctgctttaccactgtattttctgtctctgttggtacagcttgcttcaccggctctttatttttccctgtggccagaaagatcataatcgctgtgaaaacagccgcagaagccgctaaaataattgctttcttatgctgattcaaccaattcatcgtgcatgttccccgctttcgtcatattttattttcataacacatatggtttagaggataatagctcaaaggaggggaaaccattgaagataggctttatcggcacaggaaatatgggtacgatccttatcgaatcatttattgaatcaaaagcggccgatccctcaaacatgacaatcacaaaccgcacaattgaaaaagcgttgcacataaaaaaccgctacaacagcataaacgttaccgaaagtctcgaaaagctcgtttctgaaaacgagatgatttttatttgtgttaagccgcttgatatatatcctttactggcaagagcgttaccttatttaagaaaagatcatattctcatttcaattacaagccccgttcaaaccgaacagctcgaacaatatgtgccgtgtcaagtggcgcgagtgatcccaagtattacgaacagagcgctggcaggtgtttctctcgtcactttcggcacaagctgcggcgaatctgcaaaagcgaaaatcaatgagctgatgcagcatatctctcatccgctgcaaattgaaagtgacatcacgagggttgcatcagacatcgtaagctgcggccccgcttttatgagctatctgattcagcggtttatagatgcagctgtttcggaaacatcagtgtctaaacaggacgcgattttgatgtgtaaggaaatgcttgtcggaatgggaaaactgttagaaaccgaattgtataccctgcctgcattacaggaaaaggtttgcgttaaaggcggtgtaacaggagaaggcattaaagcgctggaaagcggtgtgcaggatatgtttcaccgggtatttcaaaatactcatatgaagtacgaggaggatatttccgcagtgaaaaagcagtttcatgtgtagacgagtatgtcatacgttcgtctgtactgcaaaagcataaaaaagcattttaaaaaaccatcgttttaggaaacgatggtttttgatttctgcgccttgaaaaagaggcgttctgattgtgctgatggctcggtatccgtaaaatcagctgtcacgcgatggagctgaaagccgcagttcttaagcatttcttcgtattcttccaccgggaacgttctttgctcgtgtgtctcatcaaaacgatcatacgcttctccgttccacacaaaaaacgacatatcatgaatgacagaaagctcgtcacttccggcaaagctctgccaaatatagctgatatcttcgtcctggtcagcaaatgtgctatccggaaagacttccgcaattttaaaagatgaatgaacatcaaacagcaggatgccttcaggctttaatacccgaaaaacacttttaaaggtttcgatcacatcattttttgtttttaaataatttaatgagtcacagcatatcacaacagcgtcaaattgaccgtcaaagccggtaatctctctcatatcctgctgaagaaataaaataggctggctactcgataccttttgctgggcgaaagaaagcatctcttcgctgagatcgatgcctgtaacctcgaagcctttttcggcaagccggatggagatttcccccgtgccgcatgccagatcgagaatacggcctttttccgggagagatgcttcaatccattttgtccattgatcgtaaggcgcgtgtgacattagctcgtcatacacgcttgcaaagccttgataaatcattgattcattccaaagtcaagatctgcgagcggagcgtctccccacagcttttcaaggttgtagtagcttctttcatccttgtggaagacatggacaactacatcgcctagatcaacgagaacccatcttgcttcatcaaagccttccatctttttgacttgaatgccgttttcatcagcttgatccttgatttcacgggcaatcgcctgtacctgtttatctgaatttccgtggcagatcagaaaataatcagcaaccagagaaataccttccatatccagtgctaaaatatcctctgcccgtttatcatcgcaagccgcagctgcgatctttaaaatggacttttggttcattcacaaattcctcctgttcagctgccagacacaagccagttatacgttaaaaatgtgtctggaaaaaccggttgattttttttcataagaaaaaccattgtatttttaatggactgaatcagcgcttgattcaaatctgtctcagcaagcttacgcacctcatcgacaccgggaaatgcccggtttggctcaatgtaatcggcaacgtaaatgactttttctaaaagtgtcatgccggggcggcctgaggtatgatacctaatggcgtcaagaatgtcttcatcttgaacccctgcctctctttggaccaaataagcgccgaccggagcgtgccagagctccggattatgatccaataaatgcgcaggcattttttcacgcgcaataatttgtttcatttcttctttcgggcggaatttggcgtaatcatgaaagattgccgctatttccgcttttttagaatcggctccaaaacgctccgcaagttcgatcgccgtgttcatcacgccaaccgtatggatatatcggtgttcggtcaattgctgcttcacgcatgcaagtgcctcctcacgattcatataaaccattctcctctacatacttcttcactttatcagggattaagtagtcagtgggcttcttgcttttaaaccgttcccttatcatagttgatgatacctcaaattccggaacgtctgcaaagagaagcggataaggggtttcaacatgaaaaccggggcgctttactccaataaattgaatgaggttcagcagctcgtccagcttataccatttcggcaaatattcaatcatatcagcgccgataataaagaacagctgatcatttggataacgctgcttcagtaaagaaacggtatcaaaggtatatgatggcccttctctttccatttcaacaagctccagcttaaaggacggattagattgaattgcaagctttagcatttccacgcgatgaaagctgtcggtatagtcttcgttctgtttatgcggcggaatttgattaggcataaaccaaatttcatcaagccccgcctggtacagcacctcattcgccattaagaggtgaccattatgcggagggtcaaacgtgcctccgaaaattccgattttcttcatttcaaccacctttaaggaagctcgatttgtttattttcctttgattccttatataacacaatcgtattgccgattgtctgcaccaattgagagcggcttccttttacaagagcttccgctacatcgtttttatcctcttcgcaattctgaagcacgctgactttaatcagctctctcgcttcaagcgcctcagcaatttgtttaatcatgttgtcgtttactccgcctttacctacttgaaaaatcggcgttaaatgatgcgcttttgaacgcaaaaaacgtttttgtttacctgttaacattctgttcctcctaattttcctattacaatagatctcattttttcaatattaggctcttgtccagtccacaattggaaagacaatgctgcctgttcaacaaacatgcccacaccatcgagtgttttcaagcctttttggcttgcttcttttaaaagtgccgtctgtattggattatacacgatatcacatacgacggcactgctcgcggcacgctgtaatgaaagcggcacatcgtccacgttcggatacatgcccacagacgttgtatggatgataacatcatactgctcaagacgttcttctgcttcttttatgcttaatacttctttattgtgaaacgagggagtagcttctgtaagccgctttgctttttctaacgtccggttgcaaatgtcaaattttttcggggtatttcggacaattgttgtaaaaatggctctcgccgctccgccagcgccgatcattaagaatgacagttcagagatgggcttgtctaataccttcattaatgacttcacgaagccttccccatcggtattgtatccgacaagcttatctccctctcttctgaccgtgtttacggcaccgagcacttttgcactctcatcaatatgatccaaataatccataatggaaaccttgtgcggaacagtcacattgattccttgtacgcctagagctcttattccttttaccgcatcctccagatcattctcttctaccttgaaggcatgataatgtccgtcaagcccgaggtctttcaatgatgcgttatgaatatcaggtgacatagaatggccaataggatttccgataaccccgtacagctttttcatacacctctccccttttcttaaattaatgaacgccgaacaaatacatgaacgccttttggcgcgtatgcagttacctttttatcagcgtcatggacagtaacccagcctaacccagagaaaacgatatctgtctttttgtcttttatcgtaaacgtatgggcgaccaattcaggaaactcatccatttcatctttacccggaggtgtgagcaattcccctgcatgcttttcataaagcgcgtctgcattttcaagttttgttctatgaatcatcagctcattcggcatatagcaaataaaaggagatctttccccagacacataatcaaaccttgcaagtccgccaaaatacagtgtttgctgatcattaagctggaatgtgcgaggcttcagctcctttttaggagataatattttcaggtcctttttattgacataatgcgccatttgatggttgttgataattcccggtgtatcataaagcgatgaaccgtcatccagcgggatttcaatcgcatcaagggttgtgccaggaaattgggatgttgtaataatatcttcttcacctgacacttctttaataatccggttaataaaggttgactttcctacatttgtacatccgacaacatagacgtcttttccgttgcggtaatgctcaatcgcgtcaattacttctctgattccctggccgcgacccgcactgaccaaaaatacgtcaaccggttttaagccaagctctttcgcttcacgcttcatccattggatcagacgctctcttttcagtgacttaggcaaaatatccgctttattgccaactaataagatagggtttccccccaccaagcgctgcagcccattaatccagctgccgttaaaatcaaaaatatcaacaatttttacgaccagagagtccgtttctccaataccgtgaagaatgttcaaaaaatcatcatcagttaaggagacatcttgtatttcattatagtttttcagtctgaagcaacgctggcaaatcacattttctttcgtaagcgatgcaggcggcgcgtaccccaaacctgttttgtcctcggtttggatcgtaactccgcacccgatacaaacaaccttttccatttcttactcctcccactgaatgtgcccttttcgtttgagagcactcagtattctgcgttcgacctggcggttaaagcgcgtaatgaatccgtcagaggaagcgactggcacgaccaaaatcgtatggtagccgtttcggtttcccccgagtacatcggtcagcagctggtctccgatgacaacgcagtcctcttttttcagctccatattgcgcaccgctctattaaaggctttacccatcggttttcttgctttatagatgaatgggattccaagcggttctgagaaaagtttcactcttctttcgttattattagagacaattgtcactttaatgccgtgttccttcatttcttcaaaccactcgatcaatcgcggcgtcgcgttcggcctgtcccattcaacaagcgtattatccaggtcagtaataattccttttacatttcgttcctttaatttctcaggtgtaatatgaaaaatattttttacaaactcgtcaggtaaaaaaaacttttttaacaaaacccgcacccttccctttttctttctttcaaaatgattgtcgaaaaaaatcgaacttgcgcctaaagaaaaactgagcaaaaaaatttcgacaaaaattgggtttcttcaccaggtgtggataaatttacacacactatccactcttattacatcactctttagacaaattataaacacgatactcacaagttatccactttttggtgtggataacagaacgattgttcttatatgcatttcatggtagattaaagataacttcaacctcagatgaatgcaacttatcattgtatgcgttaaaatcatgaatgattccaacttttaaggaggtgcctctcccattaattgggttcctagcatgagaaaactgtctgatgaattactaatagaatcttatttcaaagccaccgaaatgaatttaaaccgtgactttattgagttaattgaaaacgaaataaaaagaagatcgctcggacatattatttccgtatcttcttaataggaatttgtctattttttccgggcgtatttcctttttttactcagatgactgatattatatcactttggctgcgcgctttactactattttcagcaaaaaacacccctaaaaagaggtgttttaaagggccggttattatgctaaccagtatatgccgcccacaacaaggagaacaacaactaaaacaacaataaaagcgtatccatatgctctgcctgcgccatacatgtgaagcgcctccttaataaggttttataacagcctatgtaggagaaataaatcggactaggcggttgtccggctcaacgctgcaggatctgcccatcttgtattccttcatatacgatccttgcccctttaggtgtcatatgatttccagaaggatctataagaccagattggataagcgcttcatcagttgcttttccgccgtctgcttctataaaatgcttccagttatctacaagagggacatccaggcgcttcgacacatctcttgtaatatcgttatatgagttgtgccatttccttgctccgccttttggttcaaaagcagctgcttgatatctggaatagtaaaacaaatgatgcttcccattaccttctataattgggatacacgtcattaagattggcttgatcccgtgttttctgctttcttcaataaaataaaccagattttctctaaaacgctgcttcgacactctcggtttcccctcagtcagtatggcagcgtcattggttccgaacataataaacaaatacttcggtttttgatccagcacatctgtctgaaatcggagacgggcatcctctgtcgtctgtccgccgattcccgcattgagtatatcaaggttaccgcgctcagctgtttttaatatattgacccactgctgtgcttttggataatcgcgataatcccaattagagccacgcgtattactgtcaccaaatgctacaacgtcttcgtatccccttccctcgcatcctgctgtaacgaacagcagaaggaaaaggatgataaaatgtttcatctttacacccccaaaagcctcactttaatgttatacctctgtttctcttcgttcaatgaagagtttttcgctatcactgttttttcctatagttaacgtgtccccctcagtgaatatcattctgctttcattgcggcgcagctgatgattttttaaaattcccttctttccaatctgaaaaacacacaaaccaaagaaaagaaaataacctgaatccgcactggaaacaggttatccgttaaatcctgcatttactttaacttcgatttaagcttggcctttgtttttggcccataaatcccgtctgcagttaatccgttcatgagttgaaaacgcttgacggcattcgctgttttcggtccgtaaactccatctatgccattgtttttggctcccttatcagggtaaaagtgaagtacagctaaagccttttgcagctggagaatgtttgtgccctttcgataaggcgaagtgagctttataaccccagacggcagaggatatgatggtgaagtttcttttggaggtgtatccgaggaagaaattccgtttagaaaagagttccagtggtccaagagtttccgcggacattctttcccggaccactttttgtggggaacaacacgatttaacggaatattgttttccttcatcagctttctgatcagccactgggcatttgatgttgctttttcaaaatcgccgtcagcattttcacagatttcaatcccgatcgatttgcggtttcctgtcccgtttgtaccgtctcccgcatgccagccgttttcatctatcgggagatgctgataaatgactgaatcgtcaactgtaaaatgccagctttcggatgtgttcgggtttttcacaaacttggcgtgcattttcgcatcagcgcctttggctgtattcgctgtattatgcaccgtaatataagcaggcgccatcgcatagccaggacgattatcatttgataccggtataaaatccttttttatggttaccatttctatccctccctattaataagaatgcagaaaacagagagatggacagccttttttatgaggtaaaaaagaattgtgttcttaacctggttttcagttgaacagctgaaatggcaccagttatactaatttagatgacggaggttttgactcctgacatcacctaagttgggagtgaccatagacatgttaaaaaaagtaataggtatacttgtgattatcgctatcatttcagttggtttttttcagaaagaagcttggcttgatgcaatcaaagcaggagggatgttttccgttttatttagtatgctgctgattgctgccgatgtttttttcccaatagtgccgtttgctttgattgctgctttaaatggcgcagtgttcgggactgcaaatggaatttggattacactgaccggctcaatgcttggtacaatattgctgttttttctcgccaggtacagttttagagattgggccagaaaaaaagttcaggcctatcctgccatacaaagctacgaggcttccttcaacaaaaacgcttttaccgctgttttattaggaaggctgatacctgtcataccttcacttgtaatgaacgtgatctgcgggctgagccaggttcgctggcatgtttttttctttgcgtctttaatagggaaaatccccaatattgttgttgtcactattgcaggtgccaatttcaccagcaataaattattgtctatcagcatttacggtacatatattctgatcatcatgctggtcatttataaaaagttccctcatcttctgaaggtgccaaaaaaataaggaggcttgttggcccccttactttttttctgtcgcatggcctccaaattcatttcgaagcgcagcaaccacctttcctgtaaacgtatcgtctgttaaagaacggtatctcatcattagtgacatggcgatgaccggcgttgccgtctgcagatcaagcgcggtttccaccgtccattttccttcacctgaggaatgcataatgcccttgatctgatccagtttcgcatccttagcgaaagctcgctcagtcagtcccataagccaagaacgaatgacagaaccatgattccacactctggcaaccttctcgtagtcaaaatcaaattggctgttttcaagcacttcgaatccttcaccaatcgcggccatcattccatactcaattccattatggatcatttttaaaaaatgtccgcttcccgcttcaccagcgtatagataaccattttcgacggcagtatcacgaaaaagcggttccacaatctcccatgcttcatgatcgccccccaccataaaacaggctccatgccgtgcgccttccattccgcccgacgttccggcatcgagataatggatacccgcttctttcatttgattgtagcggcgaattgattctttataatgagagtttccagcttcgataatcatatcgcctttacttaataaaggtgatacatcacgcaaaacagcatcgacaatgccatgcggtaccataacccataggatgcgcggcgggtgtaataaagaaatgaactctttaagatttgttgtcccctcagccccgtatgctttcagttcatcaacagccgcttgatttacatcatatccaaccacttgatgattgcggtcaatgaattgctttcctatgtttatgcccattttccctaagccgattaatccgattttcatatctgttcctcctgattgtctaaaaagcctttactctttatgttccctatggattgtattgtgatacgcagaaaacaaatggggcttacatcgtctgcgcatgtaaattttatttttcatgaccgacggcgcctgccagttctattactgaatctctttatatccataattatcgctttatccttgatttaccatcagtttaagttaaaatatgggaaggaattcgattttttcagtaaaaagaaggtgacatgttgcagaatcaatctcatactcttattggagttacgaaaaccgctgtattctttttatacgctgcacttgcaatcatcggttttgcaatcgggtattttattccgcagattgcgaaatgggcattatccctcccctggatccctcttgaaggaccacttcggctcattacctcttttcagggatctacagcttcatttatcactgctcttctcggtatgtgtgcggggatttggttcgctcattctgttattgcaatgctgctgtctgtcaaaattacagatcacacagtggaattcatcaaaggaaaaaaagtgcaaacaattcattccgatgacatcgctcttgtatttatggatcacaaacggcttgtcctcctgggaacagccggatatgaattggtacgggaagaaattgatgaaaaaccagtaaacgttgagaaggcctttagacagcatcattacgaatgggcaacagatggtgatccgtttaaagatcaatttcgccgatggattcctgatgcaccagacctatcgcaaggcgcccatgccttattaaaagctcgtcacaaagcactgcaggacgaagaaaaagacgatattgaagaattccgtctcgaactggcacagctgggcatcgttgtacgggacgaaggcacacgccaatattggcgaaaagcagaaacctatcccccgaaaattcagctcggcgaaggattgtaacaacagaggctcaagaaagagcctcttctttactactgcacaataaacagcactctggtaccgtcaggatagctgctcatttgattccctacccacgagccggcgccgcgattatcagaaggcgtcacatatcggacatcagcccctgcaccgccttcctcgcagaccgccatcggccactcatcccggtcatagcccggcttggtcgggattccctttaaagattcctcccgccttttgtctgctccatctctgtcaatggtacaaatatctggatgtccctctgcaatcgcatccctaatatgactgccggtttccggataacgagacagcggaaaatataacactttgtcatacgaagatgcgccttggatctgttgcggaaccattaaacaaagaagaactgctgcagcaagaaacaggcctgccatccattttttcatccccatccccccatacctttgttcatttcaatgtatgggcgcttgatgaagaatatttttaacatttgaagttagtatgctgcttaccaaagccggactcccccgcgagaaatttcccggtacagacacagacagcctcccggtcacatacatttacatataggcttttgcctacatacttttgtggaggtgacgatggtgacaggtgttttcgcagcgctcggctttgttgttaaagagcttgtctttttagtatcttacgtgaaaaacaatgcctttccacaaccgctctcaagcagcgaagaaaaaaaatacttagagctcatggctaaaggggatgaacatgccagaaacatgctgattgagcataatcttcgcttggtcgcccatattgtgaaaaagttcgaaaatacaggtgaggatgcagaggacttaatctccatcggaacgatcgggcttattaaaggaattgaaagctattccgctggaaaagggacaaagctggcgacgtatgcagcgaggtgtattgaaaatgagattgtaattacaaaaggggggtgcatacacccctctttaatacgtttcaatatatatggtgtcagaatccacaatggtaacttctttcacgataaagttaacaattgtttttttatcttcaagagttaagttatctgcaccgattgattgaaaatagtcgatggctctttttagagcattttcacttgagctcgtatcatctaggactttcatttttgactggatttcgttacacttttcagtaagctgattttgctttttttgcagttcaataatttgtgctttgatttcatctatgtctaaatcatcgtcatcgcttaggctgattagcgttaaaagacgcttgcggcctttttttgttttctctatctctttttcaataagttctaattcatcagacaggtgatttgattgttcagcctctttaaaagaaacatacttttgaggatttgtgatgaatttaaaaatttcaccccatacatgccggttcaatttattctcagacatttcttttccgcagccgcggtcctttgcgccagaataatttttccggcaagtatatacatagtagtctttaccatgtgattttcttttcttccctgtcatggtatttccgcattttccgcatctaaccaaacccgataacaagtaattgtgagggctgatactcaagtgttttcttttactttgacctaagagttcttgagcataatcccattgttcagctggaacaattgctggaattgtcacagtgatttgttcttcttcaggccttattttaattatagatttgttccctgcctgctttgaaacataggaaccctctgtatcatatttatactgtctatgttcacccttataggaagagttcattaatatttgccgaacaacctgcctgtgccatactttggcgcctttttttgttttaacccccatctgagttaaatgtagagcaataccatttactctgccgaaaaaagggcttttatgatcggtgaaatagttaaaaatcatccgaatgatttttgcttcctcttctaatatctcaagagttcttttctctttaacaaatttatagccatatagtttagaatctttaatgatcatgccttttttcattttttgaagtcggccgcttgatgtccgttctttgattttggctttttcaaattctgagattgccccgcgcattgcgaaaaacaattgaccttctggagaattggcgtattcaccatttacaaaaatcaaaggtatgtttcgctttcgcaattcgtcatcaatgattagctgattcattaatttccgagaaagacggtcaggatcgtaacaaatgacttgacttataagtcccttgcttgcatcctccctcaagcgattcaaagccggacgttctaaaagctctcctgaaaatccttcatctgcatacttcagcacatctttagtccctgctttctttatacaggcctcgatttggctgtcgatgctcgatcccttgatcgcttgttcctcggtcgatacccttacatatattgctatcaccctgaatctccttcctataaagttttattaaataatgatagcaatcgttaatgcatttgtcagcttgcggtccctcgatgattatcactttcataaaatgcatcaccccttgggtaatgctatgtaacagctgtttgtccaaatgaggagattttaaattaaactatagtgttattaaacgtttcaatgaatatgcaaaaaatttaaaaaaagttgttgtgacttttctacactcctttaggtcctcaatagaaaagattttattttctatgcctcaacattcgcttattatagttttcaatgatttattattatttgagagtacaatggagtagtgtttttcattgttagatagttaatgacatttcactggtgtcaagttcgtatagctagacattaataaaaaaaggacacatataaatatgcatcctttaacaaaagagtttatttatttccctgtttcagcaaattccttcaacctattccctatttcatcacgaactctttggaaaaacgcccatttttcttcttctgtcccttgtgctcttgccggatcatcaaaaccccaatgctcacgttttacatgtggaggcgtcatcgggcatttatcagcagcatctccacaaagcgtaacaactaaatcagcattgttcagaatatcagaatcgattatatctgacgtttgattagagatatctataccaacttccttcatcgctttaacagcattcggatttaatccatgtgcttctatccccgcgctatacactttccactcatcacctaaatattgtttagcccatccttcagccatttggctccggcaagagttccctgtacataaaaagtaaatgattttattctccatatattccacctctacatcgagtgacttccaaagtattttcgttgaaaccataaagcaaccttaacaagtgctatcatgactggcacttctacaagcggaccaattacggcggcaaatgctgcacccgaatgaattccaaatacaccaacagctacagcaatcgctaattcaaagttattgcttcctgctgtaaaagctaaagtagtagttacagcatagtttgccccgattttcttccctaaaaagaaggaaacaaagaacattaaaacaaagtaaatcaataatggaatcgcaactcggacaacatctaacggcaagctaacaattacatcaccttttaaggaaaacatgacgataattgtaaatagcaaagcaattaacgtaattggactaatcttaggaatgaacactttttcataccattctttgcccttcacttttacaaaaatataacgtgtcaccattcctgcaataaaaggaactccaaggtaaatgaatactgattttgcgacttctgccatcgtaatattcactactgctccttccatccctaaccattgcggaataactgttacaaaaatgtaagcataaactgagaaaaaaagcatttggaaaattgagttgaaagcaactaatcctgccgcgtattccgtatcaccttttgataagtcattccaaacaataaccatcgcaatacagcgagctaatccaatcataataagcccaatcatatactccggtttatctggcaaaaagatgatagccaaaataaacatgagagtcggtccgatgatccagttttgcactaaagataaaattaacactttaatatctttaaatacccgtccaatttcttcatatcgaacctttgctagtggtggatacatcattaatactaatccaatagctaaagggatagatgtagttcctacttgtaatttgtttaatccaccaacaaaactcggaaatataaaacctaatcctatccccaatgccatcgcaagaaaaatccagatggttaaataacggtctaaaaaagataaacgtttcattactttatcctcaccttttttactaacagcaagagttcgttgtaatatcacttggcggtgttacacaacaagaggaggaatcttgtttttgaacctcgctgttcgatttggtatagaaaaattcccactcgttcccatctggatcagtaatccaaaatttatcttggactgcataacaacaagtcgtatccatttcttcacgtgcaaaaaacccttctttttcaagccttttcttgtgtttcaaaacttcttccaaactatctacttggaatccaaaatgattcacttgatttcccttcacctcatctgcgacatttaaagtgaaattcagtccaggagtctctaatagaaactttgcatagtctgtttttacttttacagcctttactccaaaaactttttcataaaaattgatcgatttctctaaactgacaacgttaacccctacatgaacatatttcattttaattccccctcttatatattaatcaaaaaaatttgatataatacctaaaaaatttttttagcagcaatctccttcacctttttttctaaatatacaacaaagctcttctgataataaaccatttacttcctcatcatttagatcataataactccatgttccctttgtctctttcgttattaagttggcatccaataaaatttttagatgataagaaagtttagattgcgtcacctcaaaaatctcagtcagatcacaaacacaggtttttcccctttgacaaagttcatacatgatctctaatcgtttctgatcagcaagagccttaaatttttgttcatatttccgtagcagttctgatttcgtctcatccattcatatcgccttctttaatcaattttttttgatgtatttattatactcatgatttttaaattaatgcaagcaaataaatcaatttattttgattaattgtaaaacccgctaaaagcttgtgtaaccagatagaggttttccatttttattatttcctccatcgctactttgctactacagcaacggagatcataaacgctaatttctaatttcaagaaaaaaacattaaataatttttgtgaatatgtagaatcgataataattcgagataatacgtatttagtcagagcacacagatttatcatcaattaaaaccttatgtgaagatataagccattcaatccatccttccacataaggttttaaacaatttaatcagaccttttctttttgaataagttcttcattttcataaaagggcattgtgacacttgattttcatcatctcgcaagaagtactgtttccactccagattgtctttttttccataccatcctaaatgcggatggataggtacttcatcatatgcctcaagcctttttcgaatttgcttactcatatttcgtccaaatgcagtagtatcatttagatcctcaaaaacccatctaggctgaaacgtcaacataaaataaggaaaacttctgctttttcttttgctgtgagccggtgtagcacacagaacaaaatatggttctccattaaaacagtattcccattgaaagttatctggattttctggtatatcatctggccaatcagctggatcttccatactcaatgaattgagcaactgccaaaacaacgattcgtaatcctcaattttgtaatcagtcagtaattcttctggtgtatgaaatattacagttaatgatgcatactttcctgtctctcgtgaaatagttccataccgagtaagcaatggcgctaattccttcgcagtctcgggattcctaggatcaccgacaaaagcaattcgcagctggtcgcttaaaaatgcttgccttcccggtatacaaggaaatttattttctttatcacctattttttcattcaaatagttaaacgaatctaattgccaaccaggtagcgtttctttaattttttcaagatcacttttagcatataactcagtcaataaatccacctccgaaggcatttatcataatgtattgcgggagcacgaaggaggtgaatgtctaattactttttcatatatccaaatgaatattaattaattaattggttaagttttagtgggtaggtaagtaattttcttatcaagaaaaatccagaatcagttctgcgtttagctgtacatgcacactcagccctcaaaacgactaacgctggactttctggatgttttcaattttaaactatcacaagaatgaccgaaattccctgttttttgatgccaagtcatggtactcccaggagggaatttcataactctctaaagcaaaaagttattgcggtctcaccgaaaatttaaattgcggtgccctatttcctttttctgcgaacgaaaacttgttaatatttacagtactagtagagttaagggaagggtgaatatcttgatatcaatcacatcagctgaagtgggaatgaagattaatgaatggcataggcatattcaaaaattcaacgtaactgatgctgaaatgttaaaagctgaaatagaacgtgatatagaggttatggaagaagatcaagacttgcttatttattatcaactaatggcctttcgccataaaattatgttggaatacacgctgccatctgatgaaaaccgaatggaactttcagaatatttaaataaaattgagggccataagaaaaaattagacaatatgcgggcatattattataacttcttccgcgggatgtatgagtttagaaacggtgaatacacaagagccattacatattacaaaaaagctgaacgcaaaattcctacaatctccgacaagattgaaaaagctgagttttattttaaactgtctgaagtctattatcatatgaaaatgacacacatttcgatgcattacgctgagctttcatacaacatttataagaaacacgagctttactctgttcgtcgtattcagtgccattttgtcattgccggtaactacgatgaccttgaaaatcatgaaaaagctctcccccaccttcaagaagctttaaaaggtgccgagctgcttaaaagtaaaaatactcatatctatgccactgcgtttttcaatctcggcaattgctatcacaaaatggacaacttaaataaggctgctcgttacatcgaacaagccttggttcaatacagaaaaattaactctgacgtacttccgcaagcttatcatgacctagcgttgatttattttaaacaaggcaaaaaagaacaagcaatggattgcttccgcaaaggaatcagaagtgctgtagattttaaagacgaactatttatgaacttatttgaagcattagacgttctttatataagaaatggcgatacacctaaacttctcaacattttttctcgtttagagaacggcaaaggatacccttatctggaagagctggcattgttaggaggcaaccttttcgattataatggaaaaatagaggatagtatcatctgtttcaagaagatggtatatgctcaaaagcaaatatcgaaaggggaatgcatgtatgaaatctaaattgtttatcagtttatccgccgttttaattggacttgcctttttcggatctatgtataatggcgaaatgaaggaagcatcccggaatgtaactctcgcacctactcatgaattccttgtttaattcgataaacaacattagttctgattccctttagccgtttcataacggctttttcttatttctaatactgaaaaaatctatcatacttaaagcttttgaggtgaacattttggacttatttgatgaatgcttagaagctctagggaaaaacaaagaaatcttatcagaagaattaacggcaaaatattatgaactgctttcaaacagttttcccttacatcttggggacgaatcaagtgggaagaagtttgttgtcatcaatctatagattacgaggaagagatttacgattggctagctaaacaccattttaaagataggaacattattattctttggggttacggagaacagccagcattaaaaaccagtcttgagcatgcattaaacgtaattgatgatgtaactgccgttggatcggatacttttatgtttagtgaatctggctacgttatcgaattttttcatgatggcgatgttacaattggaaagtcccctttcattgaaaggattaacaaataggtaaaatgacacagatcgaatgattcatttccaccatttgatccacataacagttagtttcatcattcttccatggtaatattttgttatgacgattaaatgaaaggatatgatcatgaaagtatttgaagccaaaaccttgctcaccgaggctgaaaagcgagcacaggaatacaaagatttaaaaagtaaaatggtcaaattaaagaaagcgttcaaagctgttgcagatttagatgatagcgagttttcaggcaaaggcgctaataacattaaatcattttatgaagatcaagctggcattgctgaccaatggattgatttaattgagatgaaaatttctttcttaacgagtattcctggttttttagaagatgccaacttatcagatgcctacatagaagaaacctttttagcgcatgagcttgctaacgcctacaccaaatcaaaatccattatgtctgaacagaaaaaagccatgaaagatatattaaatgatatcaacgatatactgcctttggatctgttctcgacagaaacttttaaaaatgaactttcgtctgccgaaaagaaacgaaaagaagccattgagaaaatggatgaagttgaccaaaacttaacatcagaatacggactatcagaagcaaatgaacaaatgattcaagctgattatcaagctttaatgaatgcgacagcaaaaggcaaaagcgcctctcctattcactataatgcgaaggcttatagagacagtgagattcacaagatgactgaggatgtaaagaaacaatcaacagactacatctcttttaaggaccaacaggcggaacaaagaagaattgcaaaagaacaagaagaactggcgaacagaccatggtatgaaaagtcttgggatgctgtttgtaattttacaggagaggtctctggatattatgattataaaagagccgctgatggggttgatcctgttaccggcgaaaagctaactgctggacaacgggtcgctgccggtgcaatggctgcggcaggatacatccctatcgtaggatgggcaggtaaattagctaaaggtggaaaagctgtttattcaacaagtaaagcattgtatagagcagacaaagctctcgatgtatataaaacacctaagacattccatgcccttcaaaactccagcaaaggactttatggacttgcttctgcaaatggttttagtgaagctataacaggacgcgatatgttcgggaataaagtctccaaagagaggcaagaacagagccttagtggtgcaatggcaatgttggttcctttcggagctcgcggaattaacaaaaagcttaatgcaaaatcaagttctcgagttagcgaagcatcgactaacaccagcaaaaaacctaaagttcctaaaacgtacaaaagaccaacttatttccgtaaaggcgttagagataaggtttgggaaaatgctaaggattcaaccggatctgttaaagacccgttaacaaaacaagtaatgaaaaaagatgaaccatgggatatgggtcataaaccaggttatgaatttagaaaacatcaacaaagtgcgatggaaagaaatattagtcgaaagcaatttttagatgaacataataatccagaccactatcaacccgaattaccttcctccaataggagtcataaaggggaagatatgacggatgattactttggagattaaggagagattgtctaatgggcgtaacacaagaaaataaagtaattgctagaacagttttaggagcttttggggggaaaccgaaggttacgaaatattgggatgataacaagaatagcagcatagatattttatcggttagtgaccagcctcaggaaggtatcacgtcatattcaactctaggtttgtcggatcattctattaattatgaggtgaatggcactccgttgcggatagaaatcgtagctgcaatggagtcagcttcagacatatatgctaatgttttatcaacttgtgcctttaatataatcaactcaaatttcacttgtgcaccaggtgttatttttaaaaatgtgattagtatgtatgatcaggaaaccgacatgaaacatattatgttcgttcccccatttttatgggaggaagatttagaactacttgaatttagtaacaaaaatgttacttggctaatggctttacctatatccgaaggagaattgcaagtagctgaaaaacacggctcagattatttacaagatcttctggaatcaaaacagattgatatttttgatataaagagagaatctgttgtttaatgactttaataaagaagagtcactttataagcccctctcaatgagaagggcttattttatttaatttgaaatcagctgcaaataatagaagaaaatgactgaggtaaggagaattctatgattaatgaagaaaaacacacaaaccctcaagctaataacaatatatttggaaggatagatacctggtattctgttcataggagttcgaacttgagggaaaataaagaaagaccagcttattatgtggctggtccttatctttaattaaagaaatggttatgtaaagctttagaaaatccaaaaccttcttctggtccctttaaccagagagaaataaacttttcgaaatccacttctttttcaatatctttcaaaattcttttaaattcttcagtaaagttatgaagagagacctcttcgccatttttaatcttatcagtgtactggctcgttaactctcttaattcttgatactgtttttcacttaaatcataggccaaaacttgatcaaataagccaaaccgatcataatcagctgctaattgttggactaaccttagttgaaaagcctgcttctcgacttttttttctaggttgtcaagcctttcttctactgttaccaattcaaatcacctcaattaaaaagctaagaaagtaaatacacttgcaatagttctagctgtagaagattttacaccagcatcaattagatatgaggaaaccgtgtcaataattgcgtcctccacaacgtcacctcgtttaactaactcgtccaaagcatctgctacatcatcagtatgttttgcgaatgtttttcctgctgatccacctaactcatcgactacctcaccaacaattctcccaccatgtcgaagcgcactggctgttgccttcattgcttctttagcaatccattttttaataccatttgtgtgaaattcaccagattgttcagttgtattagttggtaattcggatagtttaacgggagtttgataagtgacttcctgctgtgcctgtaatgttacctcttgagctttggcatgtccatccaacggaagaactaatgataaagagaatgttaatgcagatgttgctaaaagtaatttcttaaacatgaaatcaatccctttcttttaaattatttacatgtaaatgataacattatgttcagactagaaaaataatactttttactcaaatattagaataattttgaactatctgtaacaaaataaacataagtatctccttgagaaagatactcaaggagactatttatttacttcaagagagcttcaagtttcgctttcgtttttggtccgtaaataccgtcttgagtaagcccgtacatagactggaatcgtctaattgcatctgctgttttcggaccatacacgccgtcaatgccgttgttttttgctcctttatccgggtaaaagtatagtgcagccagtgctttttgaatttgtgttaccttttcccctctcatcattgggctcttcactttaaaaataccggatggtagcgcatatgacgtttttttgctgcttgtgtttgttgttttctttttagctacacttgctttgcttgagtttgtttttccgcccaactttttcaattctgcttcaattgcagtcttaacttgaatccatcttccctctgacaaaatgcggtgcgggcaatacttaccattccagtcttgatgtttgcggactcgatcaataccccatccacgttctttaagtagctgagccacaaacttaatagcaagcttttccgctgccttatatcgtacccctcctgacttgctataacaaatttcgacaccaatagacttgcgattccctgtaccgtttgttccatctcctgtgtgccaagcgttacgattcgttggaataccttgaatgacttgtttatcgtctactgcaaagtgaaaacttgttgagctagagttattcttcatgtaagaaatctcattggctgctgaagcatcattcgcagtgttatgaatagtgatatattcagctttcattggattaggacatttcaatccatactttgatttagagactagattctttacaactttaatggccatataccctctctccttctgtcagtaagataaaaaaagccactggcttagccagcagctttgtctgcgttattcttactctgttctttttcgttctcaattgtttgtaatcgatctgttattgatgatggtattttaacaccaatctgtgctaagttttcagttattgacaaaccttcattagcgatataaaaaagaacggtaccaaaggttaagacaccgttcaaattgagtactgtatcaatcacgtttgctaaaatgaccgcaaagaaattgagtagcttgcggacatagccaaaccatgcgcttcgacttcgcagttttttgaatttccatgccttgattactcctgttaaaacgtcaattatgctaagtactagaagtaaatcaaggtacttcacccctccaaataaatatactcttgctaaatctaatgtttcaaaattgataaacaaacttgtctcctccattctaatcacctcctccgaggcaaataaaaaaggacagccggatcttatgagacggccgtccctctaactgaaaagtttccatttgttaaagctgtaagctccataacaatttctttaaagccagtaatgctaaaagaccaagcttctgattttccttttgtgctagtggcaaacgttccgtcatccactttctgccctctaagggctctttttgttcccgataaggatttaccccagaacttcaattcacttgtctcagccgtcccataaacctcaatgagcaacgttttgaatgatccaacggtgaatgggttaccctcacctatggtttctgttttatcgtgaaagacaatatccattgtttttgattgagtgtctaatgagctaagattcaagccttcagtttgaacttttaaacgaccatcattagttaacccgcttttatctaactggactgagaacggagcaactgctgtaataggaacagtatggttaatgtttatatcctcttcacctgcgcccaatgactggtaaagtaagaattcagattgctgcaggttaccatttgcgtatctgaaacggaaatatcgtttagttaaatgaatccactcagtctcgccaagcgtatttgctttaacaaccaatgaagagattgtggtccatgaattcatatcgttactttcttcaatgaataaggtaccttcacgatcagaataagcgtgaccttttacttttgaaattaaaacctgacctaatcgatcttgtccatattgcgtgtagacttcagtggcttttaaaactgcgttcgtcagcagctctgaattaccggagattgaagctaccggcacaacaaaatctctgtttccttctctgtatggcttggctgcccccggcttaccagttgcatctgttgaaaattgaaaactatatgatgccattataaatcctccttgctattgtagatcattagtggtgagcatgggtttacaacggaaccacctcctttaaggaaaaataaaaaagccctaaatggcttctcctgtgatctctttatactgttcagctgtaatgagttttttctctattccttcctgtaaatcttcgggcgaacaatctttgagatgaattgcctgtttcaccatttcagaagaagcccagttataatgcaaagccagcacccaataattcatgaaccttgccctccttgtagagtaagcagttgcaactttatttttgaaagctcgcttcccaaagtttggtttaattcttcaagctgtttacgagccagtttttcctgtgacaactctcttgcaagtagatccacttgaactggtggttcatatgcagatgtactctgaagctcttcccaccaagtttttaactctgcttccgtgggtataggtgccctaatattccactctgctatatatgagggagttccatcaccattattctggacaataaaatcctttgtgggatcagctgttgggtatttaaaaagaatagcttcacctatattcatcgttacctcctaaaatcttggatagtttcggcctccaagttcttgtatatcaaaaaagttaaatacaccatttttatcatctactgcccttttcagtgtttcgtctcctccgtaattacagtagcaccagatttcaacgtaatctcctttattcatgggtacagtcgcattgccgtttaaaccaagattcatcccattatccttttcctgaaagtctcctcttacatggtgcagtgttttatatgcttttccatttaggtaaaccttcaaatgaaagtttatataagatgtataatttaaggtatatatacttgccccgattaagtacattccatcgttcggagcaataaatcgattgtttttagtatcaaaagcattatggctatccttgatgaccctgttaaatgcaattttagtgtgatcaatcttttttaaatactgaacacctgtagttccaatattcgcatgagcaaaacctgatatcttttgccacggagtccagcctgaaccactccaccagtgtctaatccaaactcctgtactgtcatagtaagtcccagactcattccctgttccgtaaaagtattgagtgaaacggtaattattatatttttcatttttgacaatgccataacccaaggggtagcctgtagtatttccctgcccaatgtccattaaggtcagtcctaaaggatattcttcccctcctgttcttgcatcttgaatagcattgtctccagtaattaacgtcagattgttatttttatagttggtatccacgtaatattttgcatccgataaagccttatccgctttttcctgagctccgacaattgtttcttttgcattccaattctcccgttccactggtgtaatgtgccgttgtaaatcattacgatgctcttcaaattcttttttcgaagcttgctgtacattatcaacgttccctagcccgatttgcgcctttgttgtattgtgagggttgttcatgtcatttttatgtacagctaaatctttatgcgcatcttgaatgcctttctcccaacggttcacatcatcttcattaatcggatcgtccgggagccaatctgtttttgcatcataagccattgttaaaccacctcaaaagtaatcctaaaatctagcgttctattattactaacgtctaaatctgttgttctttccgtaatcacgttgttttgatcatcaagtatctgaacactcttaatatgtttgatgtcttcctctcgttgagtaagcaccgtgacaacggcaccctgaatggtgagttccacaatttctgtttcatttccattcagcagcactttcgatattctatttttcaaatctgcagctgtacgctctctataaagctgtgtaatcatacaaggaccacctcgttattattgagcgtgacggaataacctacctttagctcacttgcttttcgataccttctgttattcaaaatgacagtatcttttatttggagtggctcattcaaagcagctcgcaaggtatatgccaaatgagctggcttcatattctccaatgtttctatgagctcgctcatatgctgcatatcatctatatcaatatcaaccttaaaacggtactctccgggaagcagccgaacctgagctgacggatttttcaggaaccggttcaacgcgtgttcaatggccctatatgttgccggcggtatattggacattttagagattaggcgcaatcggcggatctcatcggtgtcacctgattcccgcggtacgttcaaaatcttttcccatcgttcaagcccccaggttgccgtagtaacaaacagctgatctgtcagatcaaagatgctgttattttgcttctcaaattccggagcttccgctttaagaagttcagccatttcctttaacttggtaaggaacggcggcaggtaagcagtcatttcatcgagtttgctcaatgatgttcacctgccccaatttagggatttcgacggcactcagaaccaaattttcggccacgccgttgattttaatatctgcgtaatcacttactgaaggtgaattgtagacgatattattaatctgcgataaacggatgacgttatcttcaaaggcaatctttttaaaaagatttaaaacacctgattcaatttcttgctttacctgatcgatagagctattgacctcgggaagtacctcggctgaaatctcaacctctttccataccgcactctccactgtgacaaaggcacctattggcgcttgtccctcaccttgtccgggttcaggatcaatatagtttttcacctttgatattaaaatatcggaagcaggttccaagttagcattggtcacgacaattttgactgtaccgtccccgttccaaagcggaaagacctttaccttccccactccgtctacttcttcagcccattgtttatagtgtgctttattggcactgacagcttctcgacgcacgcgggtaaaatatctagctcttaaactgtcatcatcctcttcttcacgtccaggaatcagaatctctttcacaatcgctttttgaagcccaggtatagtgtctaatgacaatagattctgaccggatatgtttgcgttccctgcttcccccgctgtttcacactccaacgtcccgtcagctgtgtattgaaaataaagattatcaacataaaagcgagaccctacaggaatggtcacgccttcagtaaactcccctgccctgactgcttttgtggcagcagtccgctcaatgcctgcttcagtagctcgtcgatctaaaaattccccttgggccgtgtctgagaagacaagttccagaacagtatcgagccaaatataagacttggccaattctgcggctacaggagctaacgcgttataaatcacgctgccttcccttttatcaatgtccgctgaaatgctgttcaacattcgatccataatcgattcataggtttgatcttcaaacatcctcgccaagcacctcctcgatctccaatgttccttcgtcagtctcgactgtaaaggagacacggaacgattcgccttgtttttctatttcaaaatctgtaacagcagaaatccgatcgtcatagatcagtgcttcctctatcagccgagggatctccattttcttatatgcgtctgttgtttcgttatctgccagcacgtcttgaagttcatttccaatgtcatgactgtaaacagaatatgcgtatcgctcagtatggagagacaaatatacaaactgcttgatcgcttcaaggcctgtgatgatttcatttgtgatacggccattttcaaaatctattttgtaggtttgcgaggtctctatgacttcgctgtcatcttctatatcctcaaactcgatttccggagacaaagccattccaaacacctcctatattttgtcgagaataaaaaatgattgcccgccttttaaggagacaatcatcacacgctcacctgtatttaatgcttcttcaccggcccgcagccgctttggaacaataatcaaatcagcaggtattattaatttgtcattttcattaagccttatttcaacaggggaaacggaaaccacttcagccggtagaatatccactggcgactcagaatcaactgcacggacagccaaatgtttgattgcttcacttaatctcatgaggaaacaccatcagggatagaatttttctcaaccacatcaatggtcatcgtgtgtgtcgatcctttaaattcgtgtttgtctgtatcgatccagtatgttttcttaaccccgacttccggaattgagatatagatgggcaacccgctctgaagatccggaatgccaatcgcttgaatactcttgagttcttttttaacaccttttttctgtgcctgtttgactttcgcacgctcctgaagctgcgcctggttaatgttatcagaaaccgtttcgacatactgaagcacaccatatttactgatccctgagctgtcacttgcagtggctgtgtatgttttattgtctttctgccggcggagctttacttttgtggccgtgtcattaattgaagtgctgtattgatagccggtgatgttcacacccgtctccaacacccatacttctgacagatctggccaagcgcgaaggccaagcttccccttcgcagaatataattgataattccttccggtttggcttttcgtttgtttcaaggcttttagaatcatgtcataaaggctcgtatcatctttaaacactaatgatttaatggtgtaacctgtatttgcaatggatgtagtcggaatctgaaaatctcgcgccaaccgttttataatctcgtctgcacgttgatttgagaaaacataaacatctttgttcttgaccaaatattgcagcatatcataagccgtaaaagtcatccagtgttcttccggattgcgagaaaacacaatgccccggaacagttctttgcccttccacttaaataaaactgtatccccttcagatacgctgtaatatgaatgggttccctgtttcgtaatgatcttggccgtaatcgatcgcggcgcctgataccgttgcccttcgagggaaacactttcagttaccagctcaagccattccgtttctttaatgacgaaaagttctatcatgtcatcacctgcttactgcggtatttttaatttttgcccaggaaagatccagtgtcctggctgtcttatattccgtttgcttcgtttgatcatagcctttttattgactttccatatcttgcgccattttgtactgtctccataaaatttgccggcaaggtcccacagtgtatcgcctttcttaacggtgtatgttttaggagctgatttagatggccgtttcttcttcgtctttttcttctgcttgatcttccgcggcgaagcagttttgtattccttcagctttatttcataatcacgatcacctatatctttttggccctctgtataagaaaaaacctcgatactgcaagttaaattaattttcgttccagtaattaagaattgaaccggctttttagatttcacccatttctcgatctttgcaatagcattttcaggagaaggaaatcccttatactcagcaagcgggctgtgtttctttggaaaaaaagaagagaacgaaatttctttcgctcccggtttatcaataaaagtgatctccccaaaactagccacttttactgattcattttgaattgtgttggatatatcaatttgttcaggaaggaccggaagccgcagcttgtccttcccttgtgaaatccagaattcatatatggatttagtcaaaagcaacgactcccttcgttccaatgttgatatcctgttcaagctcatcgacaagggcctgcttaatcttagctacaagactgttcatgtcttggtcattgtgaaaatgctgatcgccattaaactgaataatgacctctttgccacctgcagctttaaacgttgtttgattacgacccgttgtggcagctgttacctgacctgaagataattcagtttgacctttttcagatgggtctgtgacttccattccgagtgccttagctgcttgggctaataaataacgtccacggatgcctcgctcctccggaatgatccattcccttttgtttccttcaccgacacgggcaatctgctctttggtaataagtccgccgttagcgtagccaacatatggacctccatgtctcatgcttctaatgcctggtacattattaattgatccatatctgcttttgatatagccaatcgcagcagcagcgttgtgaatcgggttaagaatgttattcatgcccggcaatttgtgtgcgttgaaggtacttgggattgtctgcatgagcccctgagatggatgtcctgctttcgcattactatcccataagttgattgccttcggattaccgcctgactcatgctgagcaattgtcatcagccctggaagccagctcatcggtgtctttgtagccatgatagcagccatgagccattgcttcacatttccgcttactgcgcccattccagaataagcggcagctagtgagcctgcttgtttttcagcaaacttttttacatcaacagaatccagaccttttacaatacctatagaggcaaaacgcccaagactcatcatgacacgggaaggtgaatgaatatccagctcttcacgaaatgccttctcaacttttttcgccagttccttggcagcctcattgacttcacttgccttagaagtcatgcctgaaacaaaattaccgatcataccgcttccccatccgtttgatgattctttagagcggataaacggcttgttaatatgagtgctgacgtattgatcagtaccagtttgtgagctattttgtccggaagcaaaacctttgatcgttccgcttccccatgatgaagatttattaacagtgttctgaaatggcattttaaccttcgtctgcaagaagccatctgtaccggtcgaagtgctgttttgacctttagcataaccattgaccacttgctttccgtaattcggagaataagagattaaattgttcattggttgtccaacgtttttctgtttccatgcttccatagaaacaacattatctctaattccttgatcaaagctcttcgtgaactgttgaccaaatgatgttgcttgttcatcaagactggatgtgtcaataataggagatacagaagcagtcaccgccgcactacggactagcggggaagttgccggttcacctcctgcagatgaagcagacgctatatcatcaaccacactcatccctaatttcgaagcagcttgagaaaggagcattttgccgcgacctttattattctcaacagggataacgaattctttaccagcttcaccaatccaagatattgttggcttcgtaatgtaaccaccagtagcatgtttctttggcttttcttttcccgaaccaaataaataatttacgccactcttcacatatccccacgctttaccagcagtttttttcgcacttgaagctactttaccaccaacttcttttaccccgcctaaaatactgcttcccaattcctttacactctgccacttttcagaccaccacttcttactaaaaagggtttctgagatggaactcttaacacttttccatattgatttagcattgtcccatttatttttggaccagctttttacactttcccattttcctgaccaccacttctcgctaaatagagtggatttcagctttcctttaactgattgccaaacagaagacgcgctgtcccacttactttgagcccaactttttacgccttcccatttacctgaccaccacttctcactaaacaaagtggattttatttttccctttacggactcccaaacagatgatgcactattccatttgttttgtgcccagcttttaacgccagaccacttttcagaccaccattcactattaaataaagtggacttcaccttttcttttacattagaccatgtatcacttaacccattgatggaagtcttcgcattactcttaatgcctgaccatttttcagaccaccatttttgatcaaataatgtactgtttagtttcttctttacttctgaaccatcaaacgctttacctaaacttgagccgcccatggtgcctgctataccaccaactaatccaccaatagctgttcccactcctggaataacactgccaatagctgctcctgtagccgctccagcaaggccaccgccagctgatccaattttttcaccaacattatctttattcatcccaattaaatcggttgccgctaacgctgttcctaatagagggactccctttgcaaacttgccaacacttttcagaggacttaagactttcccgaacttcgatgtaccgcctgcagctctaccagctgagtatagctccgatctcgtagtgattattgctgatcttgaatctctagttggattagtacctacagttctaccggaacgccttctctccaaccgttcagatgacacagcaattgaactatcagaagggttcattcggtttggattaccgcgtcgacctaaaactcttttccctcgtcttctacgaatgcgatcatttttacctccatcgctacaacagcaatatgtcaagctgccgcttcgaggtaaactcgttggacctgtggcagttttggattctctgccccttgtgctagcattacgattactgtttctattcctcctttcactttgcgtattagtaccagctttaggagtacgttttggaattaattttcggattacgcctgctgcatcacttccgacagtacctatgccttttaacagcggacgaagtattttcaaataaccaatcaatccaattaaagaggggatcacaactttaatcgctgttttcaaatcatcccaatggttgacgctccactcaatggctacgtttaacttatcacctatctcctcacctagatcagcaatatcttttttgatctctttaagtttttcctgaccttctttactgttaatgaacgagctgattttatcaaaggccggtcctaatccagttagcagagaggttcccatatccttagatatgctttcaaaatctctcatggcatcattaaccggtgtcatcgggttattatcccgaagtttcgtaaagcttcgttccaattcaccgcttgttttggcacttgtaccaataccctcagccatatctaaaataggctgcttaaggtcttcatattgtgtcccgataagctcagtcgcaatagcagcccgctttgttttgtctttcactttagaaagggcttttgccaccctaaataaactttcctctccgcttattgaaccatctttgaagcccttgaacattttcttagtttccttggctccgaacagtgttttaaatgcgtccacttgactatcagacatttcggttcggcggatgttaaactcacgcatactatcggctaggttatcgaagtttctggctccaccctttgttccttttatcatcgcgtttgcaatttggccgcctgtgagcttcaagtctttaaaggtggaactgtattcattcatcgtgtctaataaatcatcagcctggtcaccggcattccggtatacataagcaattaagtctccgctttgtttcccagacaatttcaagttgttatacattgaactgaaagcacgatctacctctgcctgatcagcattcataagctgggcaatcttacttgatgactcagtcaattcagccagagcttttttagacgcccctgtctgttgcgataagtttcttagagataaactgacttcttcccgagaactgcccgctttattgttgaaatagatctgatccgtcatttttgcaacatctttcttattaacgtttgaagttgctgacacataagcatcctgagacattgtgcttttaccagaacccataattgaacctgcagaaaaaccacctgcaactgccagagtaatggtagcacccttcaagctgtctattttcgcttcaatagcatccagagccgctgaagctctatccttaatagaaacagttggctctgcatgttcgctatctacatcagtcacatgacgacggatctcatctaattggttagaagcatgatcacgtactgaaacagttggctcagcgtgcgagctattcaaatcagtgagacctccacggatcaaacgaaaacgtggtgtagcttgatcatttacggaaaccgtcacctcatgactgccttcggtaagatcctctgcttgctggcgtatagaatgtaagccattcgaaactcgatcatctaaacccatttcaagcaatcgagcccgagccgtcaaacggttggctgatcgatcaatttgccgcataactctttcagtccggtcttcagcctcaaaaataagagggccattagcagccctcttaagtctttcagcattgccttgtatcattcgaagcttgcgggaaatcttatcatgtaattcaaacgtggctgttagtttagccatagttaattacctcccttcttcgcttctttttctaacagctcaagcttaaaaccgattaatccatataagagcgccttgaatgctttcggagcctcatatagttctcttaattctgacggggcgtatttgagctcatgcatagcatagtaaaggtatacagcctctttgtccccgtcttttactagttttttgctgcttcttcaaggtcttcgagatcatcatcaaaaccgttgatttcaattgctttgttcagccaatttgcatattcaccgccgactgaaagaacacgtttggcgacttccactggatcttctgttttgtaagcctcacgtagttccttagctttaaagttcggataaacagtcgtttcaaccgcaatacgagcataaaagcgttggctgtccaactccttcacacggccgcggccttttacatttttgtaagtggtgttctctttctcaagttcgtcaattcgttcagtcgtaattgctttgaaaatgaatggaacaacattgccttctttgtctacaaaccgtttagaaatcggaacttctacctcttccgcttcaattgtttgtcctggcataaagaatgaaagatcgtatactttttcgttttgtttttcactcatgtttattaactccttttactttttagttttggacaagaaaaaaagcacattcatactttttgaatgtgctttccatataattcatgtataatagattcttgaagctaccttagcttatcctccgaatatgaaaggaggtgaaattatgtcgacctatgaatctctaatggtcatgatcggctttgccaatttaataggcgggattatgacatgggtaatatctcttttaacattattattcatgcttagaaaaaaagacactcatcctatttacattactgtaaaggaaaagtgtctacacgaggaccctcctattaaagggtagtttcttttttaaaagctagagtgctgccacactctggcttttatattttagcatttctcatgaaagtaacacacattaacaagtggtaatgtggtaatgtggtaccaactataagcttacgccagtagttgcaatacttttgcttggcaccattataacatgaatatatattgattatataattatttgtatcttttatttgttactttttttatctatgagttcaaaatgacctgatcatagaagccttaaccctttttcttttattaaaaaccctcggattatgaaagtgttatggtacaatatggtttagtataaatgaatattggctttcaacatctcaagggcggtctggctcactccctcatgaaagggggtgatgcacgtgtcaacatttcaagcattaatgcttatgcttgctttcgggtcatttataattgccctgttgacttatataaagaagaaatagacccaccccttgagctcggcaaagtaaaagggtaaagtctatcctaaatactttcatgaagttgttaagccagccctcttgatgggccaacatttatactgacccggcggcaaccgggtctcttttattttatgcatttcttttgaaagaaatacatgtttccatttggtacggttgaattacttctaaagtaatcttaccacattttttcgtaaatatcttcgttaaagtcggcgatttttcgtgaaagtgattagaatgtggattttaactgttcaggcacatcaaaatcctcaaaggtaaacggcacttcttcttccaatgcttcagaatcaacatcaagcccagcgattttcgcagaatcaaagttcacatcgtacaaggtgactcgttcagtcccacgacctgaagaggcgtcatctagaacagcttgtaaggtgaaataaggatcacttccctttttcacatagtccatcataataagaacaaattgagaagtcactttataaaaagtggctgttcccgttccatttgctccggtcgttttgtgccccgtcatccgacgacccatgatattgacctcggatttgtttttctctacattggcttcaaacgttttgatatgggccatttcttctccatcaagaaacaacctgccctctttacctgaaatggtgttttgcgcttttaatgccattcctatttcacctcaacattaaagtagaatttttcagctgcatccaccggttgaactgcaagatcaatcaggaagccgtcacgatcattattcagagcaattgtaatgtcattctctgaatcaaaatcagtaatgccctcgttatcttgaagaacactcaagtattgagtaattagcgtttttacaaactgcagtccgtcatttgtagcgggaacatcactgccgctcgcttttcgagacttgatcaatgctttcaattgtgatgtcaggtcattattgattgcatcaagtacacggacaattttgtttttctggaacatcttatttttctctgctgttaggcttgtgagtgaattaatgtccttttcaaccgatactgatttatcacgagaatcataagtaaacaagaattccccatttgacaatcgttcaacgatttcgtcgttgtcaattcggttaaggacatctacagctccctcgtattctacaaatgtaagtgattgattaaatgtagcccccgcacttgcaccggcaacccaagctgtagctttttcaggagtgatctccgttccatcctcaagtaggacaccacctgttacattgataataccctcatggtctcccttgtaatttgaaagaacaccttgaaccttttgcccttggttgtctctcagccgtttgataaacgcaacaaacgttgcttttaattgctcgttatcctctacaggtaaagcgattgtgtcaaagtattccgtttcagccgcttccaagaaagctgtataatcggcatttgtcggtgttttgtctgttccgcctgacaagcggattccggaagttgcagggagagcaccgctaacatcttcaggggccgtaccggttaacggaatagtaactgttaaatctcctttccccgtaaacgtgacatatttattcggtttaagttcttcagctttagacactgtttgtttatccacttcagattgatcaaggtaggtagtgacatcaactttcgaagagtcaataacgttctccgtaatactaataatgatgtcattacctttagtgccgccataaagagcagtagcctttacaccttcgctaatgtctgctgaagcacgaagaccttccgttaggcgataaagcaagactgtattcgccttcttcatcgcctcacgtaaaagcaacagcgaaggatcatcaatgttcaaccccacttttttattcaagtcctcgattgaagagatagaaatgaatttcttaacctcaccccagctggacgctatcggcagcgccactgttccacgttctccggcagaaacacggttctccgcggtcgttttgaagttaaagtaaataccggcacgctctttttccttgccaggtgtgaaagttccgccgttcatctatttgacctccttttgaagaaactgagaaatcaacttcttcgcttccgattttgtaatactcattttatgaacatgaaaaagagcaccgtcaaacacctcgggttttaccccaaagagctctcgactgtgctctcgcaaatccttaatataaaaagcattttctgctttctcttttttagtggccatcatttcaccccacttttaaatttaaaaccatctattgaacgctgatcttcccgctcataccaatagcggctcgtccagtttaagacaatggtcgcataatcgtctgatacccgcgtttctattcgagataggcgaataaaatccccagtatcctcgccagattcttgtataagcggaattatgcctcttctgcttctaagtgtatccgcaattcgttccgcttcgttatgagccttctgtacgttttcgtgaaagagttttacgtttaaaacatatgctttctgaaacgtggatactgtgtccaccccatcgaccgtggaagccggtggaaagtaaagagacggaacagcaaagtcctgcggtatttcttcttcatacacttgaacaggatacagtttgtatagatagcccataattgaacctacttcttgattcatggcagcaccgccttaaaattcttcataaatccattgctgcagcttccgctcaaggcttctctcaaacatcaactgaaaaatggccatggcgttatcccaaaaccccgaaccgtctacccatcggaacttcagcagcatgccggaatttttttcagcagggtcatattcgaaacggtcgcctttccaccgacctggaacccatcgtctatcctgatttttagacggatcgatagtaaagtgcccgtcattgacgtatgaggcgtaatccagatttgttccaacatccaactttaagctgccttctgtcattgaaaagatattatcctggtcacctttctgaaaggaattgagcaagcggcgagtgtccacggtcttcgtcctaatgatctcatcttggatgatatctaagaactcaaaacccattgattcaagccactgctcatatttcctcttcagtcccccacgagaagcccggtctaatgattgtatgaactgatcgagaccccgaattttcataagtattcaacctcccgtactgccgtcacttcccaatgatgattcctgattttgcggggcttctgtaatttataagcagtaccatcccaaaccgccctgtcatttactcgaatatcagcagtagcagggaaatgcacaaggaaagattgataaatagatacatttgactcctgttggataatggactgactcttctctgtaaaataacacggctgattttctatgtccggctcatcagggtacgaaaaaaccggttgaacatcttcaaccggcaccccgaatttttgctttctattttcttttttctcctgcagatggtaaatgtcacatctgtgagtcaataaggattgataactcatattgatctcatccgcactttcgcttcaatcccttctaaatcagggtcagccggtttcacataatcttttattaatgcatacacatcaggtttttgaagagaactgccatcccctagagtataagaatagtcaccaattttttcagttgtatatcctttaataattgactcgtcgccatttataagagcataaaactgagacaactttaatagagccagtcgaaccgtttcaggcaaagggatatactctgcatctgaaaaatcatgtccaactttaagaatgatatcggcagttgcctcaaggatatcctgttttaacaactcgtcaggtctggtctttacagactcaaaaactgaataactctttaattcatcgggagtgattaacagcataggtcactcccctttgttatctatttgcttaaggatgtaggcaattctttcatctgcgtttttgaagtcagacggattgcgaccaagattagaaataatggattcatgctctgctttattcatacctttcaattccgattcagtataatttatcggatcatccttttgattattaagctcttgggttagtataaaatatggattttcatttaaatactcatagagctttttcggtactgtttgactgacacctgctcgaaaggttattcccatcacattgtatgttttgcctttaataagctttgcagtaaacacaccagaccacctactccttcactttcacgatcttggctacggcgtcctcttcttcaaaaacactatccaatttcgctgtcaaaacaatgataaacatacggcgacggatgtccttatctacttcaatccgaatgttacgagagaatccgagaataatattcttcggatgagttaggatgatatcagaaacatcggctgcagtatctccctctccaatcgtataaggctgtaaatttgcaatacctttgattggaacaccaaaagcagatgaaaggccaccttgaacagctgcatcccctaaatttgtttgacgatcagctacacgatctttccattcgacctcaataccaggcgatgtatagaaacggaactcctgcggaattcgcaaatatttaggaggtacagctttgtatcctcgtttaaatgtttgacgtgtcagttcctcacctgcagcatcgacaatatgagatgtagcttgttttctgatgccatctaattgtgcaagatatgagtcggaggaagatgtatccccatttacaagcaactcttcaatatcaaccgcagcacgctcagctatcatttgcatgattgtattctgaaggccatctttttcgatgttgttttcaagtgtgtcataggtaatgttaacttcagcaattacttcttttgtgcttaagttaactgtgctagttgatggaactgacttttgatctttagttagcgcaactccctcttgggctgcccttaaaatacgctgaccaaaaccgatcttctcgattttctgtgtgtcatggtccatttgaataactcgcgcatctcttaaaatggttggcgtatcttgtaccattcgaataaaagttgaagcctgagtaggattcataatcccgccgctctctaaagtagaaagcgtcatttctgctttattaataacctcttgatttctcattcgtatcctccttatccattaaaacaaccctgaccagattgatttttgaacttgttcggaacccgattcttcagtttgcttagatgttccgcgacttttttcgattgcttcaatacgatcagcgagcggttgaacagcttctgaaattgcctttttcaacttctcgccctctttttcagtctcttcttctttttctttatctttcttattaagctcttcctctttttctaatgtctcgagccgcttcttaattggctctaatgcttcttgaatggatttagttacttcctccgaagtcatttcttcttccccctcttttgtttctacctgactcagtaaattaccaagggcagcatgagcattcttaatttcttgcaggtttgaagcggaaaattttctgcccgcctttgcaactggctcttcatatgattgctgttgttttccaacaaaaaagtttttgagcaaattaaatagccctttctcatctgttttctcttgagaaacgggcttttcttgtttttcaatcgtctcagcagttcctgccattgaataaccggtaatttcgccttttttgatttgctcccatacttcctcagaagcctttgtgacaaggacccatgatccctttttaatggtttccccattcatttcaaagtctgccggtgcgacataggactcaaccacctcaccaacaccaccctgaaagtcatgttgcttgtcgatttgacgagcatctttcaggaatccatgagcggccttttcgatttctgcagctgtcatgaaatctccgtgggcgtccactgtatcaggttcatacacgataccgtaaacaagtttttgctcgtctgcctctttcgcaaggattctgacttccttttgaaaatcaggttgtttttctgatttcacaataaagaactgcttttgattagcagccttatccacataagaaacatgtgtgatttttgcgttcaccaattctcttggcatgttattcacctccttaaaataagaaaagacttctaattagaagtctcaccagctgtattctcagcaacataattgcttgttatctccattaacctttttacactcttatctacattccagaaaaatttattcataatgtagctttgtgaaatatgacttttctctaagtcatgaactatattcattatatcaagtaagctttccgcaaatgaatcattaagaattttatggcgtttcaaataatcaaccatgtataacatgcctataccttgagatttatctgccgcatcatctttttctgatactttttcataaagatttttcactgctccatataaacgaatcatttccatttttagtagtaagtcattatcccctttaatgcttgtcttctcattataatgggaatgtgtttcctcagtgatttcagaattactttctaaatttaatgaatcttttagattttgatcatcagttccatattgattctctttattcaattggaaactaatcttatctaatttttggtcaatagtgaattcaaattcccaatccttatatttaattttcgccaaggtactgatcaaatttgaaaccggttgttttaatttaaaaaccaagataattattgctaccggccaaatgattgatttgactattgaagagataaactccatccaattcatattttccccacctaatatgtaatgaggacattatactattttattccatgtttgctaagacttctctttgaatctcttctttttcttcgggtgataagcctaaaatcttactatctaccacaggcgatagaacacaatggcagttaacccgctcccttgttgatagtttaggatccctcggaaacatgcaggtttcgctactgcccggtatctgaaattcttcatctactccaatgactgtaccgtcaagatcaatgtgattttcacgaggattgttcttcttccctccgctgtgccgccatttctttttctttactgccggcgattgtgcatatgattcatgctgcgcggcagaggaagcggcaagcacttctgtgatggctgtggtacgcgcccgctccctatcaaattgtggcatgtctttgagagtcaactcaatgtcctggattgatgaaccgttctcgatagcattagttagcacgtcctccaccacttcatgtgtgtttaacttcatgatctcagccagcttctttgaccaatccttaatccaattaatcgtacgattggataagactttaaaaggcacctctggatctattgaatccatgattacttcagccatttcttcaatagtctgttgcaggaatccctcagtcagttcctgaaattcttcctcgaagtcatcctccgcgaataggttctgagtaaaaaacactagaagggcttttaacgtctcttctgagtctttgcttacaaaacctttgagaccatctaaaaacttcttatgctggcgtctgagcaatctggcaatgcctttttcatattcctccacatatttggggatattagatttgccaggaaagtcaggtaccatctcccccaattgcttatactgattttcctcggctttttgaataaagacatttaaactctccaatagcttatccgttttgttcatctcttcaaatcctccagaacatcccgcatatcttttaataacccgatcatattaggagtaccgttcttagatttaaacagtgcagccaaaggatcggaaacggacgactcgttagttttaccaagcggcctgttgtattcttcttctggccattcttcaagcgtcttaccaagtacccgtccagccaaatcgcgtaaatcattcggagaaactgcacctgctgttataaacggtgttagaaccttagcaatttctaaaggatctctaaagtctggcccttttagttggagtcggactttatgaatttcaagatcatttagaaataaagcattcagtttacctgtgattaattttcgttcaggctgaaatacttgttcctcagtaatctttcttgctgtgtcagctgtcgctctgttgtaatcttgagcttcacctgtataaagtgggggcaaacgaaaagccgatctaattttatctcggttcttttggtcatattcaagaaacaaagcatcttcttgaaggatttcagcaagtgacttaatatcaactttcactggtgcaatctcttcatcaccatgaatgtttttccccttcgctatcccttctgcttcaagtaatagaaacttatgagcgttctccactccttcaagcccattcatgtaatcctgcaattgtgtgtatgagtcctcagacaacattccattttctattgtgatggcagcgggaatatgtcttccttgtttgaagtacataaagttcagctcttcagctttacgagcaccatacaaattaacaatatggccaatccatcgcggtttcccataaataccgcttcctattttgaaatggaccacttcatttgctcgtttctccaatggggtctgttcatcatattgacctgtctctaaatttaaagtgcgaggatcaccatattctttaaaataaaccatacggccgtcaatcatctgaacatactttcggaatcgtttctctcttttgattgatttcatttgtccttgttcgaagtacgtaaaatcaacttcgattggttcagacagtttgcaaactcgtacattttgaacgtccatgtattcaatgccggctggcttattttcaccgtttcgaatgacctcaataaagccattgcccgtcttttctctatcttcaataacaaatccgagtaaagtctcagctgactcatcaaagtgaagatatttaacgaactcttcaagctttgtccattcactttcagcttctgttttttcttcatttgtcacatctggcgaattcacatcaaaagaatactcgaaatcaaatccaaagcccacaatatttgtcctgtaggcatcaacacattgctgtaagattgttgaatactcagcaatcatttttaattcctttaggttatacggaggaggcaaaatattgctgtcatagctgtcagcaaattcatcttcataaatttgtttcgttgattcagtaggtggagaggctttgatcactcgtgctttaacagatttttttgacatgctttacctccttcctggtcttgatctttgcggtcttccttttgattcttctttcaaatcggttacctcataatcatcgagagcgtaccagatagctgacagtgtatgcgggtctatggtgaactcgtcttctatgatgttccccagcttatcggtagcataagcaagcggcttaagctcataaatcgtgttctcgcaacgatcagagcaaatgatcttcctgaaccgcttgattttctttgtatactgaaggcgtgatccttgatatttacgggcacccaccatattgaaaccgtgttgctgaaaataacggattgtctttggctctgctgaatccgccttgattaattccttagtctctgcaaattccttaagttcttcggctgtcttatcatccgttaatccatttttgtaatactcccagtagatatagagatatttcttttcatgatccacagcaaccctaacgacggcgttatacgattccacaaaaccaaagtccatgccaacccgtttaagcgggcggttaatattagagattgcagtcataacctcttcatgcggtcgctcttcaaactgcggcagaacccgaattccattcacgccaaaatgacctttccgcgcaattcggtaaaggtctggatcgtattccttcaattcttcaagttgctggacatagctttctggcaggaaaagattatcatctgccgttgagtgatgataataggtgtcgttgctaacgattatccgcttttcataaagttccttatcatccagtacaaagcgcttctccctatcatccttgaagaaatgcttaaaagtccaattgtcctctccaactggatttgttgaaagtatcatgtgaagcggcaatgtcgggtgacgaagacgtccaagaagctccttgaacccctcatattttacttcagagcattcctcaatccaaatgagggaaatattattgattgatttcagtttggctggcttatccatccctttaaagatgattctgctgccatttgaaaatcgaatctgcatcggagaagatacacatctaacgatatgatctaattttagatcacttacaagttcatcaaaaagtgaaaatgttgagtccctatgtgtgtcgtacacttctctgataacaagtgcagtacgcttttctctgagcaatttcagaacaatcttgagcgccacatgatagcttttggatgatccataaccacccacaagaaactgaaacttttgattccagtcaaagagaaattctttaaaatgtggatttacctgtttaatcactgtcatcacctttgtttacaatggtgatctcaaaaggtttatcttcttctgtaagttcttcgatctctatttttttcttgttgatatttaagcgcatatgctccaatttaaggcgtcgttcgtcttccgaatgggctaattcatcaaactgtttaattaaattcctgagctctgccattgcacgagattgagcgttcaagaacgttgcatgacgatcccaagaaaattgaaattcgaattcttcctcttcgacttcgtttgtctcagatagcacagactttttctttttcagttctttaatcatttcctgcttatcagaaacgaacatgatcttttgcgcccttattattgcggcatattggatctgtatctgatcccatatcatatcgacaggcgaacgttcttgaatcccttccatgatggatagcgtttcttctggcaggaacttagagaagaatccatgagtcacagcgttttgatttcccttaggtgcgccgccattattacctaacgcattcttgttaccgagtggtgcacctactttttttgtgtgcacacctttttttaagggtgcacccttttttctttgccaaccatggcgttgtttccacgatttaatggtgttcacagataccccatatttctcggcaaggtccttgtatttcatacctttggcgtaatccttatacgcctgtatgtgcttatcaaccatctacattcactgccgcctccttttagattgagttgttttgaaaataaaaaagctcctcaaaagaagcttaaatatgtttttttattaaattagttatttcatcaatcaaccgctcaatatattcttgattgaagttcacctcaattattggatcatcgttcataaaacctcttaatgccacttcaacttctcttaaataatttatatattcctgtaacttgatattcagttctttatcaaagagtattgaaaatttcttaacaatcagttcaaatgccgatagctctttaaaataatcagtatgtaatttttctaagtatccttctgggtgattatagaacggtacaaaggcagcagcggtttcaattcttttattgttaatattataaatctcatcaattagtatatagccttttgtgaaaatttcatttccttttctattcttcttttgtaaaacataattagttccacctgtaaaaaaaactgctgttatagcactagtaatgactgtaccaaaatctatttgaatcaatttcatcccctccttttactaattatcggcaaaagagagcgatacaggtactattcgcaaaatttgtcgaacgaaactgttgtataaaacctaaatttagtggtgacgcaggaataattcgccgcgccgacctgcctcccattttacactacagattttttcagattcaacaaacgctcaaagtggcaatcttggcataattggctgatgaactcatctttcattttgcgtacagtttcccttgaaatgccaaggtgaagacttattgcgcggtagctcataccctccatcatgcaatcataaatgactttatgctgctcaccatggatcttttcagcccctaattcaactgcatatactcgctcttcataatacttaagacgtttgaaaagacgttcctctctcatatccatttgccttagctcagcctgactcttcccaggacttccttttggcatagtagcttctaatccatattgagcaacaccccaattcttcatgggaattactgaaccatagagtaccctttgcaatcgacgaacctctttcaccatccagtgatagctattgattagattttcaatttcttttcgattcatgaaagtatcctccttttcaaaataaaaacggacaccaaacatacagcgtaatactgtaagttcagtgtccgcaggctttccgtcttggactaactggatattttatgctttaatgaattcacattacctaaggaaaaaaattcaactccctccttaaatatggtaaaattttattataaagtagtggaggttgttatatgagagttagagaaataaaaaatttactcgacaattataataaacaaattggagttagtgtttcgcacgtaccgcacagcaacagaaagactgttcttaatttacaaaagtctttagatgcaattaacgagttgtctaaacttggttttttagatgatgatattgagagatttaaagatctaggaagtatatattattcacgtgtacctgaagataagattgaagtggataatcacatcgctaatcaaattactaatcatataaaaattgtaaaagaaaaattacgtggttttggaattttaattgatcagtcagtttctgatcaaaatgagaacgtaattagcgtaaaactccctcaatacaactcattagaagaactagaaaaattcatcaaaaaattaaataatgcatttcagaatggtattacccttgaggaaattaatggacattataaattacagggttttgacacaggttcaatgtggattgacatcttagtaaacagttcagctgcagtaatatttgttggacaacttatagatgcagctataaacatttcaaagcgatctcaagaattactcattactaaggcaaacatcgaaaagctagctcttcaaaatgagcaattaaagctacaagtcgaaacttccaaagctttgctagatggaattgaaaagggtattgacacaataacagatgccgaaataaaaaatgttactgaaggagcaaattattcaacagaatcaataggacatataaaacaatcggttaaaatctttgcagaattactccatgaaggtacccaattccacccatctttagatgcaccttctgaaacagttgaagcctttcctgaaccccaaaagaatttagaagagcctcaacaattattagaaacattagctgacaatttacctgaacaggaataacctgcacatccaagccgaaggaggagatatcctccttcttgtttacctttttataaagtattatatcttcttctcatttcaccttaaaccctatctcatgatcaacccttgcaaagctgccctttacagtttgaatcactgttttgccgtgctccggagcatctaaaacatgtgcagttccctgattcccatctaaaacaatgatctgaacttttcctgggtcaattttctgctgaatagtgaagtcttttttgatgtttatttctcttggattgtacactcaaagcgccccctatgttatgatagaagtaccagttcatatcaagaacactgaggctaagcgcttcggtgttttttatttttaggcagaaacctctcttatcatgacttccacccttggctcttcgctataaaacttactgactttcaaatccacaacctgactatcatctttgtatatcagatgattcaaagcatctttcacgccctttacataattatcaacgtcgggctttgtagtcggccgcagaaggcccttttcagctttctctttcttcttttttgagtttgaaactgacttaggcattggtctgtacactttgacatccattgagacaggaccagtaataattgtttctggtcgatgctgagacgcaaccaatgccacatactgtttgaaatactttgatttcgctggatcacgcatatgcaccttcccatttcgtattgatccacgcggccttccttgtgcgactggctcaccataaacagtgaacttaatgcaatccaactgttctttacctcccgtcaagctgttcccataacttaatttctttttctattctcggtgcagaaagtaaaattatcagcagagacacgactgctttaagcactcagcatccgctccatttgctttattttttcctcaagtaaacggattgttggtgtaagatctttaccttcatttcgatttgaagggccaaatatataaagtccaccagttgcttttatattcgttttctttttcattcccaatcacctaacctatgatttaattgcattcgatcgcctctaataatcactatgtaatcacggcacatctggtgaattcgtgaaccaagagcctcgtctatatccaaaatctcatcgattgttaactccgaagaaatcagcaaaggtttgtgatttaaataccggtagttcaagactgactggatttgttcaacctgccagtctgttgcccttggttgaccgtttattggtttaaataaatcatcaatgaatagaacttcgacctttctcatggcatcgagttttgcttctaagttatcaaagttagctttcaaatcacccatgccctctacataagggaaatacatgcagtgtactgattttttcttgatcagattattcataatcgccgtgagcaaatgagttttaccgctacctggctgtccaagtaatgcgatactgttttgcctttctcctttgatcttttgaaaatctttatagtattccactgcacactcataagcgtccttgatcatgtctggcttaccgtccgttatgaagttaccaaagagaagcttttcaaactcttctgtaatgccactagctgccatgagtctggcaattttctttcgtcttacacattcacactgttttgaataagtatctttccattcgctagctttatccggcgtacaaaccttacctaacagaaaatcatcttccgacaccatatcgtccggaaccataaggtctaactgttcatctaaatgccaagaagtgtccttatggactcgataaacgacaattccacgatccttacaataaggacaatcaaattcagccttttcttctgatacggcctgttttgttcccaaaaagcgggctgacctttcccgaagttcctgcatgatcgtttgaaatgcggtgtctatactgactgctttgtttatagccatattgtttctcctttctcttttgagtgaatggatttgataagatggcttgaacatatgacaaacttgcagctttcccctttaattgaaacgctgtcttgatagcctccatcactttttcctcaccataatcgtcgaccatgtagccgatccgctgtgcctccatcgggccgactgaccgagcaactttgttttcatatagctcaaaggcatttttcattttgtcatcgacctcctgatgttcaatctgagctggttccaaagctttgttcttcatgtaatttcctagttgtatgtagtctgcataatgaagtatggtgacgatgagccctcttttttgtggaagacggtgcaatttgatatatccctgtttctccattcggtctagtgagtatttgatctgtgcagctgaccagttaaaatcttttgctagttccacaactttgataatggtctgcccaagttctagctcttgatttggcctgtattcagctcttttgaacaagtgatcataaattttttcatccctaaactctttgaatggtagtcggggtatgaccacataccccattgcttttatgtccaagtcaatcacctacttcctttcacagagtgcagttatgtcagagatgccggctcaatcaaacggaagttcatcgtcttttatatctacaggcttgccgtcaaaaggatcggtttcttgggcgcttggtttttccgtttcatctttgtttgaaggctcggaatcgataatttctgaactgtctgcctcattggtaatgtcaatccgttcccttgtttcatcttcctcaataactgctttttgcatttcaacagagagaatcccccacttgctcaaaactgcttttaatacagtcttaagagccatcgcatcccagtcatttttccatccaaaatcagacttactgaatttctttttgtgcttctctacttgtgcctttgtccagtacactgtttttcggaagccatttatcaactcaaaataagctgcataaccaattaccgcgtctgattctcgtttttcaaaatcaatctcgatctcctcagtcaacggattccacttctgcaattcgccttcatgaatcggtatgcaattgatggatttatattggcctgttcgtaaggctagctggatatatcctttgtatccaagctgaaattgagccttacctccgtaaggaacaatccaggcataccctaagtttttatctataggtaaatcgagtgtagctgccaccattgctgaggatatgacgctcataggatctgttttctgtagcatctgctcgctgttataaaggcttaagatagaagcagtaaactgtgtagccctcttccctaacacttcctcaaatcgtttaataacagatggtgaggaaagtagccctttcattgttgctccttgttgttgcacaggtacgtttttttgtttcttttggatgttgtttttaattgattgattagtagccataatcagctaacctccttgattccaaaacgtctgaaatgagtttcctttttaactttctcgtatacatccggaaactggtctttgagctttttcgtgtcaattcgatttgagacaacaggcttccagcaagcttgatagttaccgataaacccatactctgcatccttcatttcatgtttgatttggttctctaattcttttgcctggctttgaagctctgagatctgttctttaataagcaagtattgttgaatacgttctcgattagccgcagttaaatcaatagctttgttattttccgtttcggcatatcgttttttgaggtattcctccgcagcacttgaaccatctaaagcaggagcttgtccacctaagaccttgtcattccagaactcaatctctgctttaaagatcatgtcaattaactcgtcgtctcgctcaatctctttccagacaaatttgttcccgccaatcagcacagcaaaataagctttccgatattcaggtccaagcacacccagataatgctggacctgaacgatatagctctcggggatttcttcgtcctcccattcttttaagttgtaggctgatgttgttttacattcaaggatcgctttttcaccaacgatcattcgatcaacattagccaaaatgaaattatattctggatgtctgagtattgcttttttacgtctaaccttcttgccactacgtatctcaaattcttttgcaacaatatcttctagcaatgatccaaagtaagcagcttcactttgcgattcactaacagggacctgtcctgttttgtctaaccataattcaaaaggtgtcttccacttgttcagccccaagataatggatgcatctgagccgccaattccttttcttctttcaataagccattcatcacggctcatttcagaattcttagcaagaacctcagcccgtttgcttgtcattccacctaacccccattgtttttattgaggctatctgataaaatatttgcacatgagtttttttagatagcctttaaagaagtccactttgccgagtgggcttttttattgcgcgtttttaaattcaaaaccaagttgctcccttagatacctttccaagttctctctgagaatgatttcgccgccatcaattacataatcatcaactggtgttacttcatcaccgtaaaaatctatttgtacatccgtttcagtcagcttatcgtgccagttgtttatgaccattggattttcgaccattcttattctcctctctgaatttgtctgcacgtctatcccataacagatggaattcactattgttacgaatcatcacacaccatttacgaacttccagagcagttgccggtttatgaacaaaatgaaccatcatcctatacacctgctcactacagttaagttgataccttgctgttgcattttcaatgccgtttcataaaggcgtcctttgtttgcaagccggctaatatcctcagtaagaaccttgatgcttccagcaagactaatcgcttcttcataatcaccatcacgtaatgcctctgacagcatgattgatagctcttctgctgattcgatttttctttttgcgataggaacatctgccttcaagaaatgattagtattcatactgaaaccgcctgccttccttcttgttttgccatagcaacttgatcaactagagctttccgcgtccatctatctgcaagttcctgcattttcaacccgtgagtacgaacaagtgaataaatcaatgttttgttagccgcaatcaaatcaaaaatctgcttaatatcggccatcggcagctcctctgttttacctggtcggttatccgtgagccaacgggctaaatgtttggttgcttgcagtgcttcctccaattggtgaaccatattaatcaccgcattacttgcacattcattgagtgccggatcaataggagcagcggctgtaggatgaagtttgaataagtaatgtacaagatcaatatgttcataggcagcgcacttctcaaaccatttaatacataactctggagtaagcttggcaagtccattttcaacatctgaaacatacctttgatccttacctccgattaacttgccgatttggtattgtgaaagacctgcagccttacgggcactacgcataatctgcggtaaattacgcatattgtatgggttgttctccatatgtttgcctcctgttatattaggtttttagttttaaaattgaagttgaaagaccatgctgtttataaatgacttaggctgattcctttttatttttttgcgcaagcttctcttggtgttcattcatacgctgaacaagtatgccactgaggtatttgtaggctttggcctctgcctgttcaaacagtggtccttttttcaagatgactttcataattaaaaggcctcctttgtgaattctaatcatgctgaatccttagaattatgtttcgtttcgttacatacatcctcaaaaaaaatagtccagtcaaagcctaatttctctcctattttttttgagacaataacactaggcttcctagtaccattttctatcatggtgtagtatgctctaccaatctgtgcagctttggcaacttcttcttgagtaaaccctttttctaagcggtttttcttaagccattttctcatcatttttcacccccttaatcagaaaatgtaacgtttcgttacttagataatagtatcgattcgttacattgtcaacacattttcataaaaaaagtatcgttttgttaccaaaacttatatgtaaccctttgttacgttacaatgagatatagaataaaaacaaaagtcaggtgattaatatgttctccgagaacttgaaaaagtgcagaaaacaaaagaaactaacccaacaaaatatggctgataaacttggaattactcggcctgcctacaccgcctatgaactaggtagtcgtgagcctgactataaaaccttaattaatatttcaaacatacttgatgtttctttggattatcttcttaaaggagaaagcaatgaaaaagtatttcaggatgaagcaaaaaaagtgttaaacgatcctgaaacattccttgcagcaaaagacggtgaggtaacagatgagatcttacaggctgctttggagattataacggagcaattaaaagaaagacggaaatcagataaataaacgcagttagtttattattatttatttctgtttattatgtttaattctgtttactaataagatttagattctcatttatatttcattcataccctcatttaaaaagtgattttgaatcctttacaaacccttacgtgacaagggtttttgttgtttttctcatttatattttcatttatgtttcttttatattctcatgtaaaaaaattgagcgtttattgtgagggaaattgcagagtatcgaaatgggaaaagagggcttcttgttaaaaaccttgcaaagtgtatgtgaaaaaaataaacaatacaattatcgtaacaacaataattgtttctttaataaaatttttattatcttcattcttttgtttctttttttaatctcttctctgtattttctttgaacctctttcttcttatcattatttttcatgattaaactcctttgaagtccatttattcccttgcccctatcatttgcaattgtaataattcactaatgattacaccaacaaaaaaggatcggcaagtgcttttcactcaatggtaaccaacataagcactagctggacaggttttaggatgtatctaatcgttgaggttccatttcctgcaactgatccaaaaacttccttatgaagaacaatctcttctctgttgtggggatgctaccaaaaatagtaggcaaattgatagcggtattaaaaaaacagctcattaaatgccatactggaactgtctttgatttttggatttattttctgatgcagctattgctatccgttagtttaattagaactcagataatccaagacacggtcaactctttcattgactgagcagtcgtcttcaatctttaacactggacaagataaatctgccatccaatgttcatgcaaagctctacttctaacttccattccagcattatcatataaagaagcccactctaaaaatgtttttgattgttcatatttactgccaccggctaacacttcgtttccataacgctgaaattccctgtgccttagtctctcaagccgtatatcttgtggaatccataagaagacgacaaggtcaaaataactttttagattatcgccccagccacacactgcaccagaaagaatccatttttcattgattgttaagtctttttcaagcaactttcttctttcaggaatttctctttttttagtgaatttgtctaaccaatagtaattatcagtatcaagatgcgtatgaggcaaacgctttgataatgcagcacccaatgttgaagttccgacaccagaggctcccaatatgtgaatattttttttcatacttcccctccttattaagcaaccaaactccctgtttgttgcataacgtacttactattattttgacataaatccctaaaagacctttacttttcgagggaaatccagatgcgtgttaaaatcataatacttacgaaaacagtcatgattaaacggattcatattccatctccttagacgcattttcctatgaaaaaagtcttgatttccatataatatttaaacgaatccaatttttagattgtcgtctttaaggaggtttttcatcttgaggtatacaaacagtcatttagaggattggattgaaaacttatacaagaagattgatattacagaaccagaacaaattaattttgaacggattgccgaggctttagatatcaggctttcgtttaaacctgttacaagcttcgcacttaaacacagcggaatttataatatatgcttggacagccgtaaaagccgaactgaacaatggtatgattttgctcatgaattttgccatatatatagacatgaaggcgataaaaaaacaatgcctgcaacttggactgattatttggattggcagtccaattattttacatatcacttttgcattccaacttgcatgttgcgtaatatcaaccttccgtacatacaatcacatgcaattgaaaatgtagcttggttatttaaggtatccccttcattcgctaagaaacgtttaagcatttattacaggaaactgactcaacatttatttagtcaaactgttacgggaaatttatgccccccctttttgtaatgaataatgaaatcctcatgcatttgcgcgcattgaaaaaaacaaaaaaagacgtctcccttcacgatccgatcgggcaggataaggaagggaatgaaataagcctgattgacgttttgaaatcagaaaacgaagacgtgatagatacgatccagctcaatatggagcttgaaaaagtgaaacaatacattgacattttagatgaccgtgagaaggaagtgattgtcgggcggtttggacttgatttgaagaaggaaaaaacgcagcgagagattgccaaagaactcggtatctcacgcagctatgtatcgcggattgaaaagcgggcgctgatgaagatgtttcatgagttttatcgggcagagaaggaaaagcggaagaaggcgaaggggaaataatgcagaagaagccggatctcatactccggctttctctatttgaaagagttatgaaaatcatttttttcatcgctgataagctctccgagaaagacaggcaggatcgtaacaaataacttgacttataatcctcccgcaggcattcaaagccggacgttctaaaagctctcctgagaaaatccttagatcggtatacttcagtacatctttagtccctgctttctttatacaggcctcgatctggctgtcgatgctcgatcccttgatcgcttgttccacgatatattgctatcaccctggatctcctgcctataaagttttattaaataatgatagcaatcgttcatgcatttgtcagtttgcagtccctcgatgattattaccttcataaaatacatcaccccttgggtaatgctgcgtaatacctgtttgtcctaatgaggtgattttcaatgagtatgaaaacaaataaaaaaaccgatggtttgtaccatcgatctgttttctatatcactaggccctcaatatagtaaatctagctcattggttatgaaagcttattttcattacacactatatattcatttgttatcatttctatacgtttatatcaattatggtaaaaaatggttacaaaaacccaataaacgtccaacctaactttttcatcttatttattaagaattttaacctcttccttgtgaaataaagaagcgattttcatctccaaacagttaatgctatttcatcgggacatgtctgttaaagtagccaataaatacattcggatatccacttacaaccacgattcaatttgatccactacagatttctgagctgacattaaacagatagagttataaaaatctgtaccagttccctttcacaattaggacatttcggcggcgtttcggcataatgcgaactaatttattaatgttcaacaacagaatttcgtctattggcaataaagaatccacaaatcattgcaagaatggccatcgcccaccagaacgttgagatcgcctgatcatgatcgatgataatcaaacgaatgacagctgtgatgccaatataaatgaagtagcgaagcggaaaatgaaagtctgatttgaagtatttgataatcaaagcaatgaactcaaagtacatgaagaatataagcagttctccaagcatctcataatagctgtccactttgttgaacagtgacttgtatacgaatagcacaatgtaccaagtctcgctgatcagaagtgcgcttaaggctaacgccagaaagaacagacagacgttgagaagcgcttgtaacaggtaaggcacctttttgaatttgttagaaaatctcatcatgttgtctcctatttcaatatattcgtggtttttattctcagcctacatcttggtgttccaaaatcgtagcacaatgtagtacttagaattcttttgtatactgtgaaactgtccctgcatgcgggacatcattcgcgcaatgcttctttcaccgagtccgttgctttccggtgttatatctgcaagtttaatcgtattgctaacatggatctcaaatatctcttgatccgatacaaacgtgatactgattttttcttccggatctgcgtatttcaataagtttgacatcacattatcaaatacacgaccaagctcctccaaattcacgttaatataggtttccggcagctcgcctgaaatatggacccgaaaatgctcctgatgaaggatagcaatctgatctgatattagatcgtagatcacttctttcactgcaacggtctccagatcggcctcatattccttgttcagcaggaaatacgcaaacagattgtcagacaagctttttaattgcagtgctttaccataagcattggctacataccgatctttgctggcacccgcttcgcctccctcttttttggcaaactccagattcatgatcagcgacgtcagcggtgtgcgcatatcgtgcgacatttcggtaaccaggctgcggctctcagcttgcaattcctcgatagctttaagtttatccaggaaagctttccgcagatcctcaatgctctttgcaatcatcgctaattcatcatgcccttttatcgtcatctcgtagtccagttcgcccccttcaagaatatgaatctcttgatgaatcgttttaaggtagcgaagactttggcgaattccgaagagaacaatgattaaaaagatgagggttgccccgagcaaatccaatgcaaaggccagatcataatatcgggaagagtagaaaccgtcgataatgactcgtccttcaccatcgctaaacttgacaggatgtgaatgattttgagcgtactgagtcagcttttcctttccataatccgattcggaataaatagaatcatattgcagctcctgatccttgaatatggtgaggttaatgtaattttcttttttgacccactcgccaaacgcttttctatctgatgtagacaactcattttctgaaacgtacttgctgaatttttgaatgtatcttgctgactcctcgtgataatactcttccgaactcagatatccctcgatcagatcatctgtgatcttttgcaacgtcagaaagatcacaccactcacaatcgcagcaaccattatcagcaaagccagttttttggttagcgtaaatttaagatgcgccaaatcgatatcctcttccccattcagtttttatataaaccggacgtgccggatcatcctcaattttggagcgcagcttccgtatatgcaccatcaccgtattgttggaacagtaaaagtaaggctgtccccacacactctcatatatattttgggcagaaaatattttgttgcgtttgttcatcagaagtttcaggatacgatactccagatctgacaacttgatttgcttctcctctttccacacctcattaaattcttcgctcactcttagtttgcccccgataagaaatgtttcttcctgttccttcttttcctgatagatagtatatctgcgtaattgagcaatcactctagcgtgaagttcctcttccgagaatggtttagtcatataatcatcgccgccggcgagtaatccctcagttttatcgagtgtactcgatctggccgtcagaaacagaatcgggacgttagaggatttcctgatgtgctgacatgtttcaattcccgaaatgcctggcatcataatatccaaaataaccaaatcaagcgagtcattcacaagttgcaatgctcgctttccatccttggctcttagcacctcgtaacctgcacgtgtaagggattcctccaaaagatcaccaatatcctcatcatcctctacgactaatattcgataggccatgtctctctcacctcatgattcttgttgttatttctcgtgtgtccttactatatatcgttcatagtaataagtacgttataagatactacgtaaatcttaacaatttatgaaagctgatgctcgccacaaatttgtcacattttctaaaaaaaatgatgactcttcataaattgttaagattcggtctttatatttatccattgtaaggctcaagtttttcagatccgcactacacattgccgtgataaatgggaaaggagtattgatatgattgtacaaaaagaaggacgcgggcaaccggtgagtctgcgggaacgggttcattttctggacatcgtacgaggatttgccttgcttggcattattattgtcaattattttctgatcgtagattcagtaaagggattcgaaatggcctccgatgacgtactgcataagctggtttcctggtttgccgaagggaaattcgttacgttattctccttcctgttcggagtcgggtttatgatctttatggatcgagccgcgcagaaggtagagagtcccaacaagctgtttgcccgcaggttatctatcctgttgggatttggcattttgcacatcacatttgtttgggtcggtgacatattggccttttacgccgtaagtggcttcctgttactcgccttctataaacgcacggccaaaacggtgcttagatggattatcgcacttatcgtgtttcaattcctgactcctgttttcacaatgttgtacaatgtcatcaatactgcagggtcaaaaaacccgaatttttcagagtttactttgtttagccacagcagccttacctacatggaatccatcagcactcggtggacagatatggtcacgatggctgccggctctttctctatgatctattccatgtttctcatgtttctgctgggcgtgtactttgttaagatggaatttttcaaagacatggaagcgaaaaagcctatatggaagcgtatctggatcattagcacaatcgcttttctaataacacaaagcagtatattactagacatgtttaatctttctgagaatatgctgtggaaggacatttcctctgtcttgggtcaaaatggcggcttaaccggaagtatgttttatatgagcacttttgcaatgctgtttctataccttcctcagctgcgaggccctatgatgatattcaccaaagtcggacggatgtcattgacctgttatctgcttcactctatcattggaacagttctgttcctcaggtacggattcgggcttgcggatcatattcaatccgccggcacgttcatgttcagtctggccgtgtacttcgttcttatgagctttagtacattgtggttgaaacggtttaggtacggtccgatggaattagtatggcgcaagctgacgtacggcaaagtaaacgggagtcccaaagcaactccgctgcattcggaaaaatctattcagaaataacccccttgcacagattgcatgacttcaaattagtgttgttgaatgaagcgggcattaaacggacagatttgatatatggactagttatttttatatcatttaggcttctttgggctaataaatccaccagagtttactcaatgtgcattgctcatgatcgaatctaaattgaatcttttacgcatgttcatagtcaaaggcgcctcattcgactatttttgtaacttttcgcaggaaaaattcgagaatgatgacaaatcccgcatacgacacttaatacggtagtgaacaatagtaaattagggttacatgcagcttgttttccaatgaaacaaagaaaaagaatcatacaaaaagacaggagaaagcttttgaagtattttaacgccaaatttaccgcggaagaaagagcgatggaatcacttttttgtgaaaaggcctcgcagagcagctcgaatgttttactgaacgactgaactctatattttagcaactgagggagtgaacaatcatgaaaactaaaaatgaaccaaaagttattctggaactagcaaaggaatctgatctgccagaattccaaaaaaaattacaagaagcctttgcgatcgccgtgattgaaacgttcggtgattgcgaagatgggccgattccatcggacaatgatgttcaggagtctttcaatgctcccggagcagtggtatatcatattcttcaggatggtaagaatgtcggtggtgcagtagtacgtatcaacagccaaacaaatcataattcgctagatttattctatgtatctccagaatatcacagccaagggattggtctttctgcttggaaagccattgaagcacagtatccggatactgtgctttgggaaaccgtgacaccttatttcgaaaagcgaaatatcaacttctatgtgaataagtgtggatttcatatcgtagagttctacaatgaacatcactctaatccgcatatgcatcgcaatggacgtgaagatgacaagcccctactgaatgatgatgactttttcagatttgtaaagattatgaaaaaaaaggactaaacaattgaacacggcgagatgccgcagagagttgctggtaacttttttatatttcattatcagaggaaggtaataatgatgtttaaaaggtgttttgatccctgtctcataaacaggggtcaaaacacctttgaatcatcggtttcttttctgacatataccacgcccactagtccctcaacatagtaaaaacatatcatgagttacaaaagcttttattcaaagcatatgtttattttatttatacttattttcatcatttttcagaattctggacacaaatcgggtacctattagaggccaaggaactctacatttcattaagaaatacgtactcattgccctgctttaattaattttaagccctcgcactatgccccccctgaattaagtatttgatgtaactttgaaattaagtttatgaaaatctgtcacaaacccttatttcataacacatcatttgtttcagcttccctcgcgaataccggattaatgctcggctttaagatagtcaaccaatctctccgcactgttcttaacatcttcttttgaaagatgaagtgtcccatattgtgtaaacgcaggaagaaaacgcattcctatatagttagcagtgacttgaaacggtctgataagctcgctgatcgtgatattatattctccgcctgcttgataatcagattcctgtgcgcctaaggagatagctaagagtagttcttttccatgcaatttagttcctccagttccataagcccagccatgtgttaacacatcatcttcccattgtttgagtaacgcgggactgctgtaccaatacattgggaactgaaaaacgatacgctcatgatctaacaggagctgctgctctttttctacatcaatgataaaattagggtattcaccgtacaggtcatgaaccgtaatgtctttctcttgctttaaacgattcatccaggttttgttgacaacagacgtttccaaattaggatgtataacgataactaatgttttcattagactgattatcctttctttgccaattagttattattttttacgataatgaattgattctaattttaaaatagcaactttatttacacctattttatcctttttcatgaattcagggcaactaattgggcaccaaaatcaatgatgacttaagacattgttttgtagaaatccgatatacagaataatccattatttagaaaatttctaccttttccctcaatccttaccaatttaaactcattaaggagatactttatcaccaactttaaataataatggaataagtgctaataaaataattcctacaaccaacgtagatattattaactccttccatacaatcaaattctttaaaaacatttgataaataactaatgagtttactggaatgttaagcaataagcccgtaagaagtccaggtgcatactttttcattacaacagttgcgataagatgtggaaaaatagcgttgataaccatagaacctagaaagccaatgaaaatccattttgcaatatctgattctggcatatataaaaaaccaaatgcagataaataagccaacatagttataacaatgacagcaaaatgaaattcatttgaagttactggcttttgaaactttgaagattgttgtgaccactcaggtaaccaaatagcttcctcaatattatgaagtgtaatagcaaaacaaaaaaatgctacgaaataaaccacctatcatttcctcctcggtgccacaaccaatatggtttggcaacattatattacatttgaggctgattggatatggtgttaaaagagagaagaatctgccttagtagttgcttcttaattatatgtgcaataacgtgttgttacgtggcatgtcatattcaaatataataactctaaagcaaacaaagatacctatatagtttggcatcctcttttttagttcgagtccctctatttattttgggcacaaaatagacataatttatattgactcattatacccatcacataccataccccttaaaccaatcaggattaaaatgttttaaaaaaggtgatcaaagattaagttatggtctcttttattttatgtatgctgtcttaatgcaaaacaacactggacaccactaagtcaaatgcatttcatggtactatagtcaagacttgtccaagtcaccattatcaaaatgaatttcatcaaacacttgaaacatttattgaacgcggccaagtgtcataacattaataagaaaccaacgagtgatgaatcttttaatctttcattttacccgctggctcatatcaaaggagctctaaccaaattttaatagctgtcgcacctattaattgcgctaaaacccattgcaggaattttgtatttactttttgcccaactgatgcgccaataggagaagctattaaactagtaatcataagaaccagagctggtacaaaaagaacctggcccgtgattacttttccaactgttgcgccaatggatgaaagaaatgtaatcgcaagagatgaagcgactgtgactctaacaggaatatttaaaatcgataacataatggggactaggataaaggcgccgccagctcctaaaatacctgatacgccaccaatgataaacgctaaggaagaagccaaccatttattaaatatcacttccttatcttcgctatgttcttgtcctttctgtccttttttaggtataaacattaaaataactgctataatagccagaattccgtatataaagttaattcctttttcagatatataatgagaaaagtaactccccaatacactccctaaaaggatgctgcttcccatgtaaataattaatgttttatttataagaccactcttacgataagcccaaacaccgccgagtgtcgcaaaaaaaacttgaatagcccctatccctgaaacttcatgggcagttaatgacatcactcccactaaagaaggaatgtacaatagcattggataattaataactgctccgccaataccaatcattccggaaataaaggcaccaataaaccctataatgaaaagagttgtgataaaggcaatatccattttatttgcctcctttcataggaaaagggtatctttctattcgataccctttcacattcattagcctttttgaatccaaaatttcaatatatcgccctcgtccgtttgctctaaaaggtcatgtccgcctgatttagaccaggctgtaagatcatttttggctcccttatctgttgcatgcacttctaatatttgacctgattccagttcattcatcgctttttttgttctgacaattggcattgggcatgccaagccttttgcgtctaatactttatctgatttcatgttcttctctcctctttttagcagaaacttgtgttaccgtattgcacagcggtttgggccaatctccatttcacgctgtttttcttcatctgggctgattttccccatgtttgtttctcgaatctcttggtatgcatttggttgcggaggcaaatgatctgttactaggtgtctaaattctgtttcatccgcaatgttcaaaccatggttctcgctaaataatgtacttagttgtttaccaacacttccattctcatttagctcgtcaatgatcataaagtgtgccggtaatacaattaaatcctttgataacgctttgtaacggctataaagcgtttttcttaaatctcctacccaatcttctgccataccggctaagtctggtctgccgattgaatcaataaacaagatatcacctgaaagaagatactggtcatcgacaatgaaagaagtggagccaatcgtgtgccccggagaataaatcggttgaattttaatcgttgtatttccaataataatgtcatttccttcttccaacggctgataatcgaattccacttcttcagcatctttaggcggtaaccagtaggttgcttttgttttttcagcaatgactctgccgcctgaaatatggtccgcgtgaagatgtgtatcaaatacgtgagtaatcgttgcacccttccccttcgcaaaatctataaagaaattcaccatacgtgtcgcatcaataattgctgcttcaccattggaaatgaccatgtatgacaagcagcctttaccgattcgaacaaactgatacatctcaccgccatcttttaaatccccgacttttaccggctctaaatgttcgctccatgctttcattccacccttaaggtaggatacagaatgacctgcttcagaaagcatttcggataccatgacggatgaaccttcttttgcgcaaacgaccagcacttctttatcagaaggaattttctccaagatatcttctacgccatctaaaagatcaaaataaggaacattcaaatggtcaaagtcatgcccttctatcttccaatcactaaaatcattttcattacgcacatccaaaataaataaaggttctttgttaaagattttttttgtcacttcttttggggtcattgcctttacggtcatgtttcaatacctcctatatcaaatcttttagcgggactaaaacgttaaggatacatcagcatctttcgtaaaaccaaaaaaggtaacagccccgcctacttcgattccttccataaaatcatcttttgttaaacccataacgtccatcgttatttgacaaccaaatcatgcaactcccatttcaatcagttaagaatagaaggcacatttgcgttcctacaaccttctgcgacatgctcttttccttgtcgcaatattacagactttataagcatcaaacagaccgctatttgccgcaataatcgctactcttgtactcatctgttcatcatgctttttatttattcggttttacctgtccaatcccgcatacccgggacaacattaataacctttttaaaaccttgttttttcatggtgcgggccgccatttcactccttcttcccgaatggcagataatataaatttcatcattttcgtttaattcgttagcgcgcttttccacttcaccaagagggatatgcacaactcctgggatatgagctttttcatattcctctatctctcgaacatctaaaatgttaagagactcgtcactatctactttctgtttgaaagcttctaatgaaatctcaggaattgaagatgcattttctgatgaatgctctcctccttttcgaagaaaatgacgaagtatttctccctctgcttcagtacccagatattcatggcctgtactttttgcccatgcttccagatctgctgtagaacctttatctgtcgcatgaatttccaatacttcaccagcttttaaatccttcattctcttcttcgtttttacgataggcattggacacgccaaacctttagcgtctagtacaatagttgctttcatcattttttcctccttttcttatataggggtgggggtatacaaatatacaaaaagtttctcactgtaagttaacaccatgtattcatacccccttttatatttgtgatgtttttaaatccttgtttcttcaatatttttacttgcctttaaacttctcattccgcttagcaatgagtaaatgagtaacattagataaataagttgacactgccttcctcagcatctgccaaataagctgctacaccagcatagtcaatatcatctaatagttctttttcctgtaaaccaagaagatccattgtcatcgtacaagctacgagctttaccccctgttcttgagccatctcaatcaactgaggtaaagtaagtacattatgctttttcatcacatttttaatcattttagggcccatacctgcaaagttcattttagataaacccatcttatcagcaccacgaggcatcatctttccaaacattttttcaagaaatccttttttcactggaatcagctcttctttacgtaaagcgttaaatccccaaaaagtatggaagatcgtcacttcatgatcgtaggcagctgcaccatttgcaataatataggctgccattgctttatcataatccccgctaaataaaacaattgttgtgcgttttgtttgttctgtcatgtttattctcctaactaattacccctgcgggtatattaaagtcaaaaaattttttcgaaagatctgcttttattcaactctttaaataccatagggggtataatataacgcatataaaaattcgtcaaccttaggttgatgaatttttatcggctctttaccaataagtcgactgcttcttttactaaattttgtgtgtcttcgcctttttctaaactttcacgaacacaatgttcaaggtttgtgctcacaattaaacccatcgctcgatcgatcgcattacgggaagctgctaattgggtcacaacctctctacaatcttttccttgttccatcatagtcaatacacctttaatttgtccttcaatccgtcgtaagcggtttttaatcttttgatcatactccatatatcaatgaaatcctttctttcatttatttttacatttacatgttgccagttcataactgtttacatggatacctttgcgctttagaaaacgcactcctaaatttaattccacccggtcacgagctattatgtgtattttatcacgtggaatctctaaataaaaacgttttagatacgcatatgggatgtttaaaataatattatccgaaaaattggctacatcgttataatgacgaatatctaatattgtgatgtccatagcctctaatttatctttatggatacaagagattccggttataggataataacgtctatacgttgcaatgataatcacaaaaataagcaggaatgcaataactaaataattgatactatttacaccaccttattaactctttgtttattcacaaaacaataatatacccccataggtatatagtcaagtgtgaaagttactttctttgagctgatagattcatttcgatatccgcggattgaaaaaatacttacattcgataatgccaattctgctaaaaggaactcgaataaagcaataagccgatttaattttaaatcggctttatttatcaattacttaaaattagcacaagacacgctgcttggatattaaatggggtttcattagcatggtactggttccccatgtttcatgctggatgtgactttaattattctagaattctccagaatatctgtgctaatcttccgcagccactgcatctgctttggtttcatgaactgtaccaaatggatggttaggaggagcataaatggagtaaagttttaatggcgtatttcctgtattaattacgttgtgccaagtgccggcagggacaacaatggcagaatcatcatagacatttctttgaaagttcaaatgatctttgctctttcccattttgacgatcccacgcccctgctcaatccgtaagaactggtcaacgttaggatggatttccaaaccaatgtcttctccaataccaagactcatcaaagtaacttgaaaatgctttcctgtccataaagcagtacggaacgtattgttttgttttgtggctctattgatatttacaacaaatggttttggtccataatccttcaaaagaaggtttctatcttcatatgaagagcgcaaatcggcacctctgtgtactttctccatctcatttggaatagtccaataaacagatcttccatcattatacatcggcacagtcacataataataacattgaggcgaaaaagggttatagtacattttttgatccccgcaattataaatttttgtgatagtatcctatgcatttattaagggagtgtgctaaatcaagaaaactcatattaaacacaaaaatgaatgttcgatcaccgtttgattcatggatgaataatttatcaccgaccttgtaatcgttttctagatgttgaatttcactagcctttgttaacaagacatcgaatgacacctttatatgatggattatcaaaggtcgacgatcctaaatggcttttgaacatttacatagcacaacaacagagtatacggaattctgttgtttgtcccccctatcccagctcttttagatttatctctttggatgcgccttgatggccagtttttcagcagcatagaatttatcccctcctgaatcgttatagcatatttcaacgccgatagacttgcggttcccagtgccgtttgtaccgtctcctgtatgtgggctcgcttttagtaaaccagtttatattctttttgggcacacaacagaaacaattttccatatgaaaatctcgtaattttacacctctttaacttgaaggaggatttttgcatatgtattttcatacccgtcaactaccatctcatccagcatatattcctcatatgcattttcccctatttgcattccatttctttcaatgaactcaatgattctccggtacgcctcttcagtatttccgcctatttcatatccaactgcatacaggccttttggccgtacatgataatttatgttctctgccccatcttttacttttatataaaagtaactgtaattgtagaagtctttttctaagatttgttcccgtgcaaagattccgcctatcggatatccttcatctaattcatattgctgaacttcatgaatgagttctgaaatggctgccacatattttcgttctggtaagtttaatgtttttcggcttaacatgaatgtttcttcatttaaatattcaaaagaaattgaggaaaaatcagtctcaagtgcttgttctgtaagcgtcacttttgtttgtaagatcgtttgcaactgcttaagctcatttatttttttatcaatctcaatagacttttcttttagaacatgcaggatcttgtctggtgtttttccttttattagacactttatttcttttaatggaaccccaagctctttaaatagactgatgacttgaaaagtctcaaattgatgataggaataatatctatacccattttctttttttatttccggcgagaaaagaccaatctcatcataatgaaataaagtttgtttttttacacggcagagcttcgaaaactcccctgttgtgaaatacttcttaacatcttcgctcataaaaacctccttgactatacggtaaccatataccttatgatttgattgtacttgaaaaaagcttcaagcgaaaaggataggtaaaaagggttcaattgagtaaaaggggaattcagatgaaaaaatcaataaatgagcaaaaaacgatattcattatactattaagcaacatcttcgtagcatttcttggtatcggtttaatcattccagttatgccttcttttatgaaaatcatgcatttatccggcagcacaatgggttatcttgttgcggcttttgccatttctcagttaattacttcaccttttgcaggtaggtgggttgaccgtttcgggagaaaaaaaatgattattctcgggttgcttatattcagtttatctgagttgattttcggattagggacccatgtttcaatattttatttctcgaggatattgggtggtgtaagtgcggcttttatcatgcccgcggtaacagcatatgtagctgatattacaaccctaaaggaaaggtcaaaggctatggggtatgtttctgctgcaattagcaccggctttattattggacctggtgcgggaggatttattgccggctttggtatccgcatgccgtttttcttcgcctccgccatcgcgttaatagcagctgtcacttccgtttttatactaaaagagtcattgtcgatagaagaacgccatcaactctcatctcatacaaaggaatcaaatttcattaaagacttgaagagatccattcatcctgtctatttcattgcatttattatcgtctttgtaatggcttttggtttatcagcttatgaaacggtattcagcttgttttctgatcataaatttggcttcacaccaaaagatattgcagccattattacgattagttccattgttgcggtagttattcaagttttactattcgggaaattggtcaacaaacttggagagaaaagaatgattcagctgtgcttaataaccggtgcgatcttggctttcgtgtctactgttatgtcaggatttttaactgttttgcttgtaacttgttttatttttctggcgttcgatttgctacgtccggccttaaccgctcatttatccaatatggccggtaaccagcagggtttcgtagcaggcatgaactccacatacaccagcctgggaaatatatttggacctgctctaggcggtatactatttgatcttaacattcattatcctttcctttttgcaggtttcgttatgattgtcggccttggtcttacaatggtttggaaagaaaaaaagaatgatgctgcagctttgaattaattcattttctataaagttaagtcatttggatgcagggaatgcccctggttaggcacaataagaaaaggtacttaatttgataggctacatgttgcttgacgtgaatatagtataagctgagttttagcaatatcaggataccgggataagaaaaaaggagaatgtagtatgagtataaacataaaagcagtaactgatgataatcgtgctgcaattcttgatctacatgtcagccagaatcaattatcatatattgaatctacaaaagtatgtttagaagatgcaaaagaatgtcactattataaacctgtcgggctttactatgaaggagatctagtcggttttgcaatgtatggattgtttcccgagtatgatgaagataataaaaacggacgagtctggcttgaccgattttttattgacgaacgctatcagggaaaaggattagggaagaaaatgcttaaagccctcattcagcaccttgctgagttatataaatgcaagagaatttatttaagtatatttgaaaataatattcatgctatacgcctttatcaaaggtttggttttcaatttaatggtgaactcgactttaatggtgagaaggtaatggtaaaagagctatagatatccaagcctccttgtttgctgagaaacgtttgaacttcgataatgattacctacttaaactgcaagatcattgtttaaaaaagcctggatgaaaatttcatctcaggctttaagcatcttattagtcaaaatctcatgtgttttatccagatgttattcttttttccggacaatttctaaataattaatatgccggccaactgtttcgtgcactttaaaaatatacccatcggcttctataacggacccaactgcagcgtctatttgttgagtcataaaccagccgcctattgtatccacttcgtcacttgctaacgtcgttcccaataaatcatttacatcttcaatgagcactttcgaatctaagatatagtgattatcatttacttttctaatattaggcacttcatctttatcaaattcatctctgatttccccgacaatttcttcaagaatatcttcagcagtgactaaacctgaagtgccgccatattcatccacaagaatagcgatatgtgttcgctctttttgcatttttaccaatacatcatgaattggaacggattcaataacatggataacagggttgatatgattttctaacttgaaatcctcttttatcttctggtctgtgtcaatataagctgacaaaaattctttagcattgataaaaccaatgattgaatctttatctccatttaggactgggtaccttgtatagctctctgtcttaatgatcttaacaatagtttcataagaatcctcactagaaatcgctacgatctctcttctcggaatcataatttctttggcgattctttcatcaaattcaaaaatattatttacatatttcaactcattttgattgatttcaccgctcttatagctttcagacagtaagatgcgcagttcttcttcagaatgagcaagttcatgttctgatgcaggtttcaaaccgaagagtcctactataaaccgggctgaaccatttaaaaaccatataaaagggaacaggatgcggtaaaaccaaataattggctttgcagtcaaaagagtgatggtttccgctttttggatagcgagtgttttaggagcaagctctccaactacaacgtgcaaaaaagtcgccatcacaaaagcaatcactaagatcaatacatgtgagactgtttcacttacatgaaaatgagcaaataaggggtgcaaaatcacttcaaaagtcgattctccgacccagccaattcccaacgctgtaaccgtgatccctaattgacaagctgacaaatattcgtccaaatgagtaatgacctttttggctgatatggcacctttttttccctctaatatgagttggtcaatttttgatgacctgatctttactatcgcaaattcagtcgcaacaaaaaatgctgttaagacaattaaaagagtaaagattataaggttaatggttgtcaatgatttgccttacctagtaaggcgtacacctccgatgtaaatatttattgaataaacaaaaaacagtatatataacattataagttcaaaagaacctaaaatcaactctgaatgatgtaaataatcatctttttccgtatggagagtggttcccatagtcttcaactaacgattagtggcgttttaaggcttaaaaaagaaagcaaaataaaaacacacctgaattttctggtgtgtttcaataatacccaaccgtcttgatttatttaatgtctttataaagattttcttttaaaatttgaatcaattcggcctgttgctttatatttttgcggccatttctattaattgcagcaagttcacagacaattccagctgaaatgaaaaacaataaaccttcaaacattttaaatcccccactgtctaagtgatagtcaaatttgttttttctttttgcaatacctgcttataatcttccttacgctgatatatgttatttaaaatgagtccaataatgacaaacagtgttcctactatatcaaaagcagttatgttatatcctttgatcaccatgattaacaatgtagtaatggggacaaagttaataaataaaatcccattaatggatgataggattttaatgccatagttccaactaaggagggctatgatacctggtaaagtaatcataaataaaaaatcatacttaattgctgcaatcactttaatactcggtaccgacacgtaaccttgcgcggtaagtatagctgtcatgattcctgttatagctgtgccgaataaacatgtcaaagttgaataacgaagtgtggaccactctcggaatatctgtccccccattgtgtagacaacccaccctaaaacaccaatgaatataaagagtatcgagaatagatgatcccctaatgaaaaaaagaaacttatattacctttggttatgaccatcgaagcccccaaaaaggcaatcaatatactgatcattgtgtattttttaggtttcacatgtttatatccccatagaataacaattgaaagcatcggcatgagtgcctcggcaatggatgctgtcataattccagacttccccatcaacctttgacctaaaaaaataagaacattgtatatagtaaacgccatcaccccaaataaaatgatccattttgctttaccctctaaatgaaatgatttctttccttctctcaccaataataaaatcactaacataatcgttaccacaccgtagcgaataaatgaaaaataaaacggatcaacaaattctaatgcatgatctgcaactggaaacatcgcgccccaagacatacttgctactaaacatgtaagggcaccaatgaataattgaccttttttcattgaattcccctccttttctttaaaattacaatgagaattataaaaagaagtaagcatcaagtaaaatgaacaaaagtgatgaaaaacatcattgataatgatactttaatgaaggggggatcttcatggaactgcgagacttacaaattttcaaatgcgtagcccatcacaagagtattaccggtgctgcaaaagagttaaattatgtacaatctaatgtaactgcgcggattaagcaattagagaatgagctcaaaacacctcttttcaatcgccataaaaaaggggtttcactaagcccagagggccgaaaaatgattgaatacgttaacaaaattttgaaagatgttgaagaactggagcaagtctttctagatactgaaataccgtctggaatattaaaaatcggtacagtggaaacagtgaggatactgccgaccatcatagcttcctattataaaaagtatcctaatgtggatttatcattgcaggctggtctaacagaggaacttattaaaaaggtcatgaatcacgaattagacggagcttttatttcaggccccttgaaacattctattctggaacagtatgatgtttatactgaaaaacttactcttgtaaccagtaacaaaacgtttaatatagaggatttttcaacgactccgattcttgtttttaaccaggggtgcgggtatcggtctaggcttgaacaatggctcaaagatgaaggtgtgctcccaaacagaatgatggaatttaacatcctagagacaatcttaaatagtgttgcacttggactcggtataacagtggtaccggaatctgctgttatgcatctagctgtacaaggtaaggtttattgccacccattgcctgagaaagacagctgtatctcaacaatttttatacgccataaagatgcgtacctgacaaattcaatgcgcagcctcctaaagaccattgttgaacataaaaatatgagtatggcttaaagtgatttttctctttctatattctaacttcttaaataaaagagaaggctcatctccacttcgctacccttattcacgcaaaaaatagagcagtaaacatgtgagttactgctctgcttcgtttattcaccgttcatttgttttacaatgtattcagcatcatttcctacgccttgaagcaacgctgaacctcgcttatgctgccaaggcaaacctataaagtacaatccttctacaggtgaaacacctctatgatgtatgattcgaccttcttgatccaaaacaccttttatatttatccaacataagggattcctgaaaccagtagcccaaataatattgtttacttctaatgtagatgaatctttaaaaatgatttcattttgctttgcggcaatgactcttttttttaagatgatctccttctgttttattgcatgttttaattcatgcccaaatactggatcacctttcttttgaatgaatttgcctactattgatgtatgacttgcatgtaaaactcctagtttatcaaaccaccaaaagatgcttctttttccgatcattaaagggaaataaacaagtttattactacaagctaaatatgtaactctttctttggataattcaacagctatttgagcaccactattcccaccaccaactactagtacatttccatatgccaattgttttgaattcttatattgtgatgagtgtagttgattaatattatcggataaatcctttgatattgatggaatattaggggtatgaaaaggccctgtagcaatgacaagattcttcgtttgatattcttcccgatttgtttttattaagaaataattctttatttttaggacacttattacttctgtccgtaattggattggaatttcaaattttttaacatacttctttagataagcaacaatttcattttttgaaggaaatccatgtttttctccttcaagatgcattccaggcaaagagctatacattcgagaagtaaataaaactaatgagtcataccgatctttccagctctcccccacctcatgacttttatccaaaatgataaacttttgatcggactgcttaagataatatcctattgagatccctgcttgaccagccccgattactatagtgtcgtacacattatcaccccgccaatttcaaattgtcagtagacagaatctgcaaaatcctagttgatctcctcactataaagttagataaaaaatttaatggtgatggtggtcacgctgcttctccattttgggctgacaaaggatcgcattgtcgtggttatgcgcttcggtttccatttgaatggttacgtgcgtaatgcctttatgctcaagttcatgttcaattttgcgtaaaatattttcactttctgaaatggtcagttgatcgtcaacaactgcgtggcaagaaagagcattcaatccgcttgtgatagaccatatgtgtaaatcatgaatgttttgaattccctctgtcccttcaattgtacgaatgatatcagagacatcgatattttctggagttccttccattaagatgtgaatggaatctttagtcacattgtaaccgcttcttagaacaagaatagccacaatgatactagccaatggatctgcccagccccatccaaagaagatgataagtatggcagctaaaatggcacctacagagccgagcatatcgcttattacatgtaaataagctcctcttatattcagattattctttgtatctccgccactcatcataatccaagcgaccaatagattcacaactaacccgatgatactaattgtaagcatgccggttgttgctacttttggtggattagagaagcgttcgattgcttcataaatgatataaagagaaataagaattaaggcagcaccgtttatcacagctgcaagaatctcaaatcgtttatagccgaatgtcttattgtgatttgcctttttttcagctaatgtaaaagcaatcagggcaaccattaatgaaattgaatcactcagcatatggcctgcatcagataaaagcgccaggctatttgttaaaaatccacctatagcttctataatcatataacctgtaatcatgataaaagagatcaataaaacctttttatttgctccttcattatgattgtgacccataaaaaactcctccttacctaaagtttttaatacatatgtatttattatttcaaatctgttatgaagcattctaacatgatacaaataatatttatatatgagcatgtgttcatatataaatatatctgctctttactgaaatgtcaaaatatttttatagaaatccacaatacctccttaattattcttttataaacataaaaaagcggagcaaacacatggtttgctccgctaccctagtttctctatccttttcttcaatcaagcatttgagggtagtattcaactacaatttacctgttaaaaattgggcctcaccaagtccaaaactccagtcagcattatcattttcaacaatagatacaattaaatcagttgatgcgataccacactcagattccagtctttcagctaacagcctgtaaaatttttgtttcttctcttccggtcgggatttacttgtaactgaaagaacaacaagatttttagttcggttaaatcctaacccagtatcctcaataatcatatgattttctggatgttcatgaacaatttgataacggtcttgttgaggcacatcaaaagcctctactacaacattgtgagcgacatctaaaagttttttcaaacttgattgatctcgcccttctattaagtcaaaacgaagtaatggcataaaatcccctccttctactacaacagtctttttaatttcattcgttaatgtgtcagctatttccaagcagctgctacatttagaaaataaagtaatttcccaataaccccttcattctggtgttagtcaagcctatgttatgatgtgtatttccataggcaatatacagaatcaacttcgagtaattaaccattttttgaaatagctttatcacttactttagaaatcatttattcttctaagctttagtttacatgaagctctgctatcatatataattcaaaattaagatggaagacatctcaaaatcagatatcaactatggaggactagatgaatattcagttgttacaggtttttctcactactgctcgtgaaggcagtatttccaaggctgctctgactttaaattatgcacaatcgaatgtaacgaataagatacaacaactagaaaacgatttacagacaaaattattctatcgtcatagtcgaggaatcacacttactcccccagggcaaattcttgtttcttactcagagaaaattctacatactattgaagaagctagagcagccatgggcgaatcatccgcgccttctgggccactgcgtataggatcaatggaaacaacagctgcagtttggcttcctcaactccttgcacattataataacctctatccaaatgttgatttgaacctagtaaccggccctacggaacaacaaatacaagcagttttacattatgagttaaacggcgcttttatttcagggcctattgaacaccctgatttagttcaagaaaaggtattggatgaagagatggttcttgttacaagtgcttcacaccctgtgatttcttccattcaggatgttcaaacacaaacaatgcttgtattccgtaaaggatgctcatacagagcaaagctcaatcatatcctgcaagaagaaggtttattacctataaaattaatggaatttggcatacttgaagcgatcattggctgtgtaagcgccggcttggggatttcactgctgcctcgttcaatcattgcttcgcatgaaaaagaaggccgcatccgcagccacactatctctgacaaatattcttttgtatcaactatgtttataaggcggaaagacactttaattacccctgctttatctgcttttttaacgcatatgagggatcattttcagataaagaggccagatcaatcgtaaataaatggatggaaggcatgcttcgcctcaaaatacccctgatcagttgtctgatataaaaatataggcgcatctcaatgtttgtatagagcaaaaaagcaaacttcggtatgtagtttgctttttcttcgtgattttgcactctgaatcgtgaaacctagtcgatattaggatgtagattttcctcattcaaagaattttgaacgaaggtcattgccctagacacttggttgcgtcttgaagttaaaggctgactatttcctaaagcgtcaatcgctctcacaactattaaatattcacctacagatttcgggtgacaacgggaagattgatattttcggttggacaggggcagaacatccaattgtaacagttgaagtatccactgatggaggagatcctgcagatctgagtgatattgctgttgattgatcaacttgtttttgttcggaatatactcagtatatagccgcatattcctcctgcaatagctggaatgagccaccccagccctatgttatacataggaagaatctgagtgaaaatacgattcacaacttcaatttttattccagccgccttcaaaccgtcaaataggctgatgatgaatgcgaataataaactgccttgatacacttctgtcttccctttaaatacagaatgcaaaaacgttaaaaatattaaggaaatcgcgataggatacatcgtcagtaagacaggcattgacaccttaatgagctgggttaatcctatatttgcgacaagcgtactaaacactgataaaacgacagcaatttttttataagaaatgttcggaaataattcatgaaaaaatgaagaacacgctgtgatcagcccgacacttgtcgtcagacacgccactgtaatcattaagcccaataagattgaaccataagatccaaaataataggatgaaaccttagccaaaacctctgctccattttctaaaatccccagttcttcaacgctggaagcccccatataggaaagggctgtatacataactgctaagagtacagctgcaatcgcggctgcttttgcacaaacaactatcagctgttttttggtagaagctccttgttctttcaatgcattcacgatgataattccaaaaacaaatgctacaagggcatccagagtgaggtatccttcctgaaatcctttaaaaaacgcttgtgatgtgtacccttttgatggtgcttgaatggttccaattgggcgaataagagctacggctacaagcaatccgataaatgtcagcttaattggcgtcaaaaatttaccaactatatcaatgatttttgaaggattgagtgataacaagcatgccaatgcgaaaaataatattgtaaatatgatcaatgagacagggcttgcatcatttgataaaaaaggttttaccccaatttcaaacgatacgtttcctgatctcgggatagcgaaaaaaggcccgattgccaaatagagaatcgtcgtaaatacaatgccaaacaccgggtgaacacggctggctaacgactgtaagttttgtttacccgaaaaaacaaatgctgttatagccagtaatggcaatccaactccggtcactaagaaacctgcattagcgacccatacatttttcccggccaattgaccaagcataggcggaaaaatgagatttcctgctccaaaaaacaatgcaaatagcattaatcctataatgatgatataggaagcagacactttttttgacattatatatcctccgattaaagtagacacttcttgaatagccaggaaacattacagatgctatttgcactggcacagtgttgattccaaaataagcttgtgtcagttttatatatttttatcaagttaaataaaagcatgatcattttgatcgtttccgatatcggttaaaaaaccaattgcaccaaaaccatataaacaacggttcccccgctatggaaagaagcatatttttcttccacaagtgaagcagtacaacagcagctgctccaaccaattcaggaatgccatgacttccagaaagtagactcacatctttcaaacaataaatgactaaaagcccgattaccgctgatggcagcactttaccaagatactgtacatatttcggtgtcggtttgccagacgggaaaatcatgaatggaaggaaccgtgtcagcattgttccaagcacgaccattgcgatggtgatcatttgctgcgtcatagtcatcgtcatacggaaacctcagctttctccaatggttttctcagaacagtcagtacccctaaaatggcgagcatagcaggaataataaattggtttccgccaaaaaggataagactggctactgaaagtccaagtcccgtgagagcactgtaatgctttttctctttcatccattgttctatgaatatcacaataaacagagcagtcatcacaaaatcaagcccttcggtattaaacttcacgtacgacccaaaaatacctcctatcgctgcccccgcgacccaatataaatgattaagcagtgtcacaaaaaacataaaccagcccttatcaacattcgccggaacattagcggtataattgatagaaaatgattcatcgcacattccgaaaatcagataaagctttttctttccagtccccctgtacttatccaacatggaaattccataaaacaaatgccgggcattgaccattaacgtcaaaaaaagagcattcatagggttgaacgcaccaagtaaaaaattcgctgcaacaaactccattgagcccgcaaatatcataaaactcatgatgattggatagattgcgctaaatcccaaagaatgcataaagatcccataagctatccccaaaaataaaaaccccgcaaaaatcggaatggtatatgggaatgcagaacgaaatgcagcccatatttgacttctcttattcatatgagtgtttatagcaggagagcttaaatgtaacgattctttatttttattcaaatcaacaacctcctacatttcatcaattggcacactgacagttcttttttctgtactcatgactatgcttgtgtcaactccactaatagcagggttctgcattaatgaatcaatgataaaattccgataactctccatgtccttcgccacaatcttaagcatatagtcatggcttcctgtaagtgtgtagcattcttgaacctgtgggaatttgtttatatcctctaaaaatgaatgaattgtctccctatttaagggtgataagttgatgagagctagtgctgtgacttcgattccaagttttttctcatcaacaatagtcgtaaactttttaattatacctgcttctactaggttctttgttcttgcaaggcaagctgatggtgaaagcccaattttcttagataaatttaaatttgatattgaagcatcttcctgcaaatctcttaagatggccttatcagtttcgtcaagcataatacccatttcacaacccccaatacaacttaacagaattatatttcatacaatttaaataataacgaatttttattcgttaatcaaatattatttaaatttaaatccttttaaagtattattcacagaataaaattatcctcgcgattaactcataatgaaattaacttacatcagaaagaagtcatgggagagttatgtacttgtgtgacttgataccaacatcataagaaacttatcagaagccaaaaagttattgcggtctcaccgaaaattgaatttgcggtgccctattgcctttttccgcgaacgaaaattgttaaaattcgcaaaacagaaagtctactctattattattttaaattcgtcctttagttcttcttgagcctcttgtataacttctaatacatcgtcagcgtatgaacctaaaaatgtattgctgaactcaaaatttttcaagactaaagtgagcggcaaatccacccaccctgtcaggcaatcccataaagcgtctaaatttctcccatagtagtctgggaagtctagtttatcttttaaatcatcatgtaaaacttctatattttcaaagtctcttccatctattattatttttctcattagaaactatgccctccattattttatcttaacaaacgtttactatgtaacagctgtttgtccaaatgaggctgaaaacaaataaaaaacaccgataggatgaaactattggtgtttgcaagacatcttcatacccggtaggcataaataatgctaaactttgtttttaaaaagctatcatatcaaatttttatgttacagcttttactatcgtttaatctaattgaggagtaaaacaagatatgtttgaaaatcacatatcccctaaaaattaaaaactaatcggcagttcttcgagtgctctcatcagaaaattccctttccatttcatttgtttcttttcgccttttaactgtatatttggacagcggcgtaataaggtggaaatcgcaatctttgcttctaagcgggctagctgtgcaccaagacaaaaatgattgccatggccaaaagcaatatggcggttgttctttctttcaatatcaaatatgtcggcatttggaaatatcttttcatcacggtttgctgatgctaaagaaatgatgatcacatctttccgtttaatctcctgcccatgcagtataaacggttcagccgtccagcgaattgtcgttagctcaacagggctgtgaaaccgcaatgcttcttctatggctgaattcatcaagtccggctgctggcggagcttttctagttgatcatggtgacacatcagagcatatgtcatattggtgattaagtttacggttgtttcatgacctgcaacgataagcagcataatcatcgagtacaattcttctgtacttaattgtgtgccttcactttccgcttgaattaatgcactgattaaatctcctgcaggttctctcctttttttgcgaactaaggattccagatattcaacaaactcccctaacaagtggtcattctcctgaagtctttcaggggcatctgaaaaatcaataattgcttgcgaccatactctgaatttttgacgatcttccaagggaatgccgagcatttcacttatcacgataatcggcaatggaaacgcataatcgtctactaggttcatgaatttgttgggctgcactttatccaataaagaatctgcgatatgctggattttgtcttccaactgcaaaatcatccgatgcgtaaatgctttttgaacaagagttcgcaagcggttgtgatcagggggatctgaattaagcatatgttttgttaaagtctcttcattcttcaatagagcaggacgtttttcttttgcggtaaatacattttcatagtttttctttaatttttcattctttaataaatgtattgcatcatcatatctcgatatgagccagcctttccccagagctcctaaagataatgggtagagagcctgtgattttcgcaattctttataaaattcatacgcttcatctttaaatgctctcgaagacaattgactttccgtcaaaatggttacactctttttttcttttgaagacattcattcgacctccatctttgaaaggttatgataatctttaaatataaaatcaggacgatttgtaaaatgatccattgagatcagtattcatgataagggccaaaatgccgtccccgcattttgaaataaaagatatgagacagtcattaatcattttgctgcctaaactctttccctgataaaatggcgaaactcctaatacttctatgccggctcttttaaggatttggaaaattttttagccccattttgattaatgttatccccctgctgctatataatcgatcaagtttaatgtcgggtttatcacgatgttttaatagagcggcaacaaccatttcaccattctgaatgccaacaaaaaagaaatgctttttaaaatatgctcttgtcagtactttatgcatttcaaaaataaatgaatgatctttttttcgcgttttacgagtaaatccataaaaggatattgattgaaagattgatggaatagctttgccactttgcttacttcatctgctcttgcttgtcgataaagaaacattgatgcacctcctctgagcagtaaagcaggaaatcgaattaaagcgcccttcctattggaaaggcgcctgccgttttactgtgccaaaatgtttttcatcagtgagtttttataaaatcatttattaattgatcagttgtcaatattgtggcaaattcatcatgcaatgtagctagagatatattatgaatagtcgccgcatcataatatgtatcattttggtctctcattccgaaggctgctgttgcatctgaaatcaggtatgtatcaaaccctaaattaccactcattcttgtggtggttgatacacagtgaggcgtggttaaaccagttatgactacagtggttatttcatttaattttaagaattcttctaaattcgtaccaataaagctgctatttactgtcttggttataatgacttcttcatccataggcttaactatttcctttattgcaaacccttcattctttggatggaataaagaatgaggtttatcagaagtgtgttgtatgtatatgactgtccatcctttttctctccataattctagtattttactaatgttttcttccgcctttacgttattccgttccccccattttttatcatcgaaggctttttgtacatccacaatgattaaagctttcttttcttccacaagataccctcctacgtagaatttctatttattactacattctaaatacaaattttacttttgtacaattgtttaatgatgaatttcaaatgagcgccttctttattggaaaatgcgttctatactgcaactgtgcccaagccgttaaccttcaaatctaatctgagaatcactggctctacagagaataataaaaaacactctaataacgagtgctgaaatgaaaaactattgatttagaagccatttgatacgctcagctgaaatgatgtagtggagtattataagacataaaaagacaatactaactggttttaaataactaaaataaagcgctgcaacagccattgcaaagatcaataattcaataactaaccttgttactccgtttacagctattacagtttgtccgcttcgactaggatcatgaggtactgcaaatacagaccagacaatcataactgcaataggtaaaaccaaagttaaaacatatttaaaataaccattaaagcttatccaagcatacacccctaaggagattagtgcagcaatttcaagggtgaatcttaaaagtaaattagtctgattcagtttttccaactcctctataaaaaacacccccgcaggagatgctctttctctgctttatttcagcgtataaaaacttttctgttcttcctctttagattctattgtagttttcggcgagattacctctacttttgaagagatgataccgactgctgctgttaccaatgctccgataatagaacgatgataagtataatgaaatatgacaacttttcccctcctattcagttaattatccaaataatcaggaagttgtctacaatttgcagaatttgtcgaacgaagtaaagattatacctgggaggctttactcattgtatgaattacagtaaataaattgccttcccttttgagaagacgttccaactcagctagactcttccaataggcttccttttggcgcagctgcttttattcaaaaattgagcaacacctgaatgtttcattggaatttctgaaccatcgatcgctgctgaatttgttgcaaatgcatacgtaggagtagtcgaatggtggttgaaaaatgaaatgccttccccacctcgagtgatggcagaaaaagcgggggttttgttagagaggaatctatagatatgtgtatcgaagatttgacagcattaaaaattatacttacatcgttgggaacaggccaacaataaagcggaagaacgttgtcatttgaagtggtttggaataaaaatgattcgaatatgttcttatcattgtaaacgaacaaaaaaagaacatgttttgaaaaaagattgatcaaaacatcttcttatatgttgtcatagcgtaactttttataaaaaggttaattacattttcggggcttccaaaccaaattttgcccattcttcttttgctggaccataaatacctggaacagttaaacctgcttgtctcataagaacagtcatttgtccccgatggtggttttgatgttgaattaaaaacatcaaaagtgaaccgttaggcatttgttgtccaataaagttgatacgttcttgaagtgtatggtcagtccattgggtttttaatgcctgtacaaatgcattactggcttgatgatagctgtcagctataaactgagcagaagttggaacaggataatcttcagctggggcttggaacgttaagtctgtgtttgaggtaatgatgccaatggcagcaacagtatgccaagcaatacggcctagagtccaattttgtgaagttatttcttgtttaagtgattcatcagtcagactatttaatagtttctgtgtagcatctgcttcgaactcccaagatttcaaaaaatggtctaaggtttgaaacacaaaaatcctccttttcattcttttgttttttcaatgtgcttataggttaattataatgcctcctttcgttaaaaagaacaaaaatttcggacaagaataatcatagtaaaatgcgtagacattcttaaacgtaacgatttacgcatctttttacaaacatctgactacttggtctccattgtcagcgagaatcaaatatcatatgaagacaatcctatattcttatcactttactgagcaataaataccttccgtatacttagtaataccttcatcgtaatcaggatacttatatgcaagaccttctgatacagcttttgaatactttctaaataatgcatagcaagtaaataaagacttccacatttcctgatacccattcacagaatatgtagacatgagttcctcccattctttatttgaaaggtaccgcttcataaatttatagttcttccccatactaaatgaataccctttctgagatgcgatatgccaggccatcattctcaataaattaggacgtacaatttcatttaaatggtcaatggcaaaaaggatttcatttcttgctagtccttttactacgtaagtcgaaaccatccagaactcattacagcaatcatcaaattcccttgcagtcggcctttttatccagtattggcgatcatttggggtcactttatagttgatgaacgaatccttatcaagcaataccttaaccaaaccatcgttattagcaaaataatcttctgcttcacgaattggaataagggttagatctaatttgttgccatcctcaaaaagaataatgtatgaaaaccaattacctaattcgggaggaaaaagctccatatcttctggtttttgcatcataatgcgcttcccaaagatttcgagccactgatcattttctttaaaagattctacatcagttacaaaatacgagatgtcataatcttggaagttgtcaggagggatatttctgtttgtacgtgacccttccaaagtgaccaatcggattctctcatcgttcaaagcaaagtccaaaaaaatgtccatcatttcctgctcacttcgcattacatgttcctccgtttcagccttaatatctaactgtaaaacgtcttatagatttttttactcttgaatgtgatgtattcttctaagctttattttacatgatgttctcctatatatcattcaatattaagatgcaagacatctcaaaatcagatatcaactatgacggactacatgaatattcagttttttgtagagccgccatgggacgacactatctttgacacactttaatcccccctgctttatcgacatgttaactggtatgagagattgacaaaaagaaggaaaacgatatatttaagcgaatacgagtttttgagtaaattttaaaatgacacttttttcaaaaatcatgtcttaacgggaggattcggtatgaatgaatttatgaaaaagttttctttaacaaaaccgattattcaagctccaatggctggcggtattacaaagccccgacttgcatctgcagtttcgaatcaaggtgctcttggcagcttagcatcggggtatcttacgccagacctcctagaacaacaaataaaagaaatatttgagctgacagacgctccttttcaaattaatgtgtttgttccgctaggtctagagatgccaccaaaagatcagattaaaaagtggaaagaaaacataccgttagctaatcaagtaaatcaattcacatctgtacaagaagagtgggatgacttctatcaaaaaattgatctaattttaaaatacaaggttaaggcttgctcattcacttttgatctgccgcctgaagacgcagtaaaggagctaaaaaccgctggatgctgtttaataggaaccgcttcaacagtagaagaagcattgttaatggaagaacggggaatggatatagtagtccttcaaggaagtgaagccggtggacatcgcggagcattcttaccttccaaaggtgaatctgccgtaggtttaatggctctgattccacaagcagcagatgcactgagcgtacctgtcatagctgctgggggaatgatagaccacagaggagtaaaagcagctttaaccctcggagcccaaggcgttcaaatcggttctgcctttttaatttgtcacgagagtaacgcacatccagtgcataaacagaaaatactagaagcaaacgaagcagatacaaagcttacgacattattttcaggtaaagaggccagaggaatcgtaaataaatggatggaagaaaatgaacagtttgagacacaaacccttccgtacccttatcaaaatacactaacgaaggcaatgagacagaaggcttcacttcaaaataaccatgatcagatgtctttatgggcaggtcaagggatacggtcattgactgaggaaatttcggttaagcagcttttaaatcagctttgccaagaggatataaaaatataggcgcacctcattgatagagcaaaaagcaaactttgacaggcagtttgctttttttttcgtaatttcatccactgactctggaaatctaaatactcctacattttcaaagctaatttgaatcgggttatcaatcatcacattgatacgatgcgatcttgataatttcaccacaaccacaatacattaccaacatttcgatcttatctccccttctcaagttttgctccctattcgaataatcgatagctcccatattaaatttgaatagtaaaatggttctttttcgtttgattcagatgatataaagtcatatgataaaaaaagaatgagacagaaagcgtgagaagtgatgaaaataggattttttgattcaggaattggtggcatgactgtattgtatgaggccataaaagttcttccttatgaagattacattttttatgcagatacgttaaacgttccatacggtgaaaaatcaaagggtaaagttaaagaatatattttcaatgcagctgaatttctggccagtcaaaatatcaaagctcttgttattgcgtgtaatacagctactagcattgcgatagaggatcttcggagaaacttcgactttccgataatcggaatcgaacccgctgtaaagcctgctataaataaatgtacagaggaaagaaaaagagttctggtagttgctactaatttgacgcttaaagaagagaaatttcataatctagttaaagaaattgatcaccatgaccttgttgattgcttagctcttccaggactagttgaatttgctgagaactttgattttagtgaagacaaaatcattaaatatctaaagaacgaactatcttcttttgatctgaaacaatatggaacgattgtgttaggatgcactcattttccgtttttcaaaaacagttttgaaaaactgtttgggataaaagttgatatgatttcaggcagtgtcggtactgcaaaacagttgaaaaaagttcttgcagatcgtaaccagcttggtaaaggatcgggctcaatcacctttttcaattctggccataaaattgtggaccaagaagtcatatcaaagtacaaaagattgtttgaaatattagatgaaactcaaaggagtcatgttggacattgaatgtaaatgaaaaagacaatctcctgaagagaaacatgaactaagaagcgggcttaaaaagcccactttttttctaacaaacaattgagttatacacacatatctgattacagtgttttctctctttcccctcttatttctcccccctctctatagcttttctatttcaataaaacacaagtctcgattgaaaagttatcgtaacatttacacttcacaggagatttttcacgattgcgaatcgaccgtttgccagatgcacaaagtcataatgtgtaaattctgtatctatgtgcatgtttattatggaattattttcataatgttttataatacaagatgatagcgttttctaattataatgatagggggaaataatgatgatgaaaaaaggtctgcttgcgggtgcgcttacggcaaccgtgctttttggcacatgtgcagtagatgtaccgggtattattagtccaaaaaccgcagaagctgcatcacagctaactgatggaatcggcgggagggcttacttgaacagtaatggtgccattcttgttacgaaaatccagcttcctagctccactcaggtttcaaatgggacagcctacatctactctggttttagcggaggcacagaatccgatatcgggtttcagtacagtgataaatataatgtatggaaaccatatatgaaagtcggttcaaaaggacaggatcaggttcagtacctcgaaggaggaagccaattcacgaatacgaaaggcttccgtcccggcagcaccgtacaacttaccatctacaaaaaccttaacggcaatacccgcgctacatactggggcacgaacaatgccggatacaacggccgtctcatttcagaaatcagcaaaacaaatgtcggctccatctcaaaatggaaagcgctcgctacagttgcaacaacagggtcacgccaatctatcaaatcaaacttttcaacatcttttacaaacatcaccatcgacaacaaagcaataacacctgtaattgatacacaagacttcgctaaagtaacagtctcaggcaacagtgtcagtttatccgttgtcaaaaattaaaacatgttaaacatacaatgcgttaggctattgagaagctctcgatagtcttaaagggggcttaacatgccccttttttcatttcaatttaactttcagttagcttcggtacatgccgtctatccccgtcttttatctgggtgaagtaagggcagctcgccccttctgaacctgttccatttgctcaacgcaaaaggtgtgcatcactgtcttaaaaatgttaaaacaaatagcagatggtgcactttatttttagatgaggcatgcttacgctcgatatgcaagtcaaatgattaagggtctgcaagagagagaagttttgggtgtactttcataaaagagggatggcttcatatagctcgattgcatcaggaagattagccaacgattggccgagaacaacacatcactttgaaacggattcattccaaaatcataagtatgatccaataactaataaagatcagttagcagtccagccttaaaaatatttttacatcaattaaactagcatcactatcgaataagctcgatctgcatatcatgtactatcctcttttaaggaaggtgatgttatgaggtcatttccattaatcgtagttctattcatcctattaatcatcgttgggacatctttctttggtggctattaagaacacaccttacctcatatccatcagacgccataagaaatctttatggcgtctgttttttattagatttaaacaaaaccattaaagtgggccatgcaaacacacctatggagattactgccacgacttctttgtgagggaattattcttccctttatggactattgtcgatcaaaagagaaagttgaaatgcatttttatggtgagatgaatcgaggcttagacatataaaaaaccgcaaagctttcttgaagaagctttgcggtttttgggtctcttctttgcttcatataagccaatagatttcaagcgtaatccactgccatacatccaatgattttttattttgaaataggtttcttctactcttcatgtgagatgactcaaggtatgccacgtcacaataatatggcggatactgaatggtctcaatcagttttttccccattctatcaattctccacagaaaaaatggctatggcagaacaactttcatagagtaatcatcatttaatgagccatcatctcatgggcaatatcgtgtccatccatttttgacgggtagtaagtaggccagtttttgacttcatcaagtaaagcttcacggtcgtccccccaatagagatggtaatgactagctttagtcgggtaaatactatgatcactaaactgaatatactgaggcagcccttctgcttttttagctagtttgaatatgtatcttacccctctattgcccgcatcataggttagaatttcgtatccgtcatacgtatacttaccagaatattcttttccatttttgaagaacgttacagtatctttctggattacaatacggtcaacatctgtttgatagccttttttataatactctttatattcttcagctgtcttgccgccttcgtgttctgatttatatgaaaacacttcgtcaagagtaccatcttgcaggtatggatatacagattgccaatctccttcccaatcagaaagtaagcgatcctttacttggctgtttttaaaatagccttcatatattttttctgtttcttcatcatgcgcatgactatgatcgtgagaatgttcgtgtgtatgactgtcagatgtttgctcttgcgttttggaagagtcttcttcaactgctgaggatgatgttgtttgattagactcacctgcagaagaaccggaagtctgacatcctgccaaaactagtaatgaaccaatcgttaatatgcctagccgttttgaaaataaaatgttcattccaacactccttttttattaaatcgaaaacattacgatttattatacatacatctcttgcaaacatcaaaggaaaaatgctcttcatgcggatggcctattttaaaggaataactgactatgttcatcagttattcctttaaaatacgaaagtctacgatatttccatatcgatccgcttcaatgtgacagcacccctcaagcagctgttttaattttccacgtccgcgttgtacccttgattttgctccggagtaagaaatgccgagcttttcactcaactctttttgtgataacccctggaaatcagttaactcgagcgcctctcgatacttttcaggcaaccgtttgatggtcgatcgaatacacacagttgcttccttggtgaaattttcttcctctgcactgtcattaaaatgtagaacatcaggcaatatttcgcttgttttttttgtacggtaaaaatcaataatcgtatttctagtgatccgataaatccagctgtcgatcttttgttcatcgatcagatttgggagatgcacttgtattttcataaatacgatttgcaagaggtcatcaacgatagattgatcgttaaccctatgtgaaatatatgtttttaacggctgatgaaattgatcccatagatcctctatattcatttgaaaaaacctcctataattttgcgtctgctttacatttgcttcgtctttttaatcgtaacaaagagcaaacaattgttgaatcaattgtattgcagctgttgccaaaaataatgataaaggagaggtttgttgtggagtatacctatttagggagaacaggattgcgggtgagccgtttatgtttaggcacgatgaattttggagttgatacagacgaaaagactgcgttccgtatcatggatgaagcacttgataacggcattcaattttttgatactgccaatatttacggctggggcaaaaacgcaggattgacagagagcatcattggaaaatggtttgcacaaggaggacagcgccgcgagaaagttgttctggcgacaaaagtatatgaaccgatttctgatccgaatgacggaccaaatgatatgaggggcttgtctctatacaaaatcagacgtcatctggaaggatcactgaagcggcttcagacagatcatatcgaattgtaccaaatgcatcatatcgataggcggacaccgtgggatgagatatgggaagcttttgagactcaggttcgctccggcaaagtagactatattggatccagtaattttgcaggctggcatttagttaaagcgcaagctgaagctgaaaaacggcgattcatgggactcgtcactgaacagcataagtatagtttattagaacgaacagctgaaatggaagtgctgccggctgcacgggatcttggtttaggagtagtggcgtggagtccccttgcaggagggcttcttggcgggaaggcattgaaaagcaatgccggaactcgtacagcaaaaagagcagatttaattgaaaaacatcgtttgcaactcgagaaattttcagatttatgcaaagaactaggagaaaaagaagcaaatgtggctttggcatgggtgctggcaaatccagttttaactgcgccgatcatcggaccacgaacggttgagcagctgcgtgatacgataaaagccgttgaaatcagtctggataaggagattctccgcatgttaaatgatatctttcccggacctggaggagagacacctgaggcatacgcctggtgatacattcattactcaatactgacatttttcttaaatatttatactgaactatcatattaagaaagacaagagcatgtttgtctcttgtcttttccacatcgtgctgaaaatgctggctaaacatcgacaaaaatgctgccgcttaaaaaagaaccctaaacaatagagtaactggaaagacaactggcttgatcagcttgggacccctttcagctgtatttaaatcaatcaaactaatgattcattggcagtctaaatattattattgtttctttacaaaatagtaatagcccctgtaatgattgctaacaacgtaataactaatgatgtaattacagcccacttaacggcaaacctttgaaatgaccccaagtccattttaagcatgcttactagcaatactgttgacgcaaccaatggactcatcagatgaaccggctgccccattatagaagcccttgcaatttctactggttctataccatatgctgaggcagcttctgcaaagataggtaccataccaaagtaatatgcatcatttgataaaacaaaagtaaacggaatactagtgagtgctacaataacggggaaaaaccctcccattgatgaggggatgatggatattaatgatcctgctatggcatccaccatctttgtcccggataatataccagcaaatactcctgctgaaaataccaataataccacggttatggcattaccagaatgctcggcgattcgctccttctgcatttttacattcggataatttatagtaagggcaagaacaaaaccaattaaaaataaaactgacggatgcttagttccaagcacaataaacaccatgatacttataacgaggaataaattaagatatattaagcgtggccttttcaattgttcgctctccaaagtagcagccatataagattgagagctgtcctttgttatatgtctaggctctaattgaacgatgcctattcgattcctctctttccttcccattagaaaagccagaaatatcacacaagcaatacctccaagcatggtcggaagtaatggcacaaagaaatctgaaggatccaaacccagcactgaaatcgctcttgtagctggtccgccccatggagtcattccgctaacgatactcaacgacagcattgctaatgtcgccataaccatgggattcataccaattcttttatacaaaggtaacattgctgagactgttatcatataggttgttgtaccgtccccatctaaagcgataagcattgccaagacggcagaccctatcgctattttcacagggtctccctttactatagataaaattttttctattagcggatcaaataaacctgcatcaattaaaattccgaaaaaaagaatagcaaacaatagcaatgccgctgaacttgcaactgtttgaattccttctaaaatcatgtcgccaatacccttaccaaaacctccaataagagcaaaaacaatgggagtgatggtcaaggcaacaataggcgagactttctttgtcattattaatattgtaaaaacagttaccatcgaaaaacctaaaatagtaagcatattacacctccaagaatgcgctttcaaatgacttttgattaacatatcttatacggtgtaataagttaaataaatatttttttactgtgtttcaaaaaaaattctatcataactttaaatggttaccatttgttcaccctttaaaaaatcaatgaatgctttaacgagtttgattcctaatgatttttgatcgtacattagccaagtatctctcattagaggcttacccttagcattatacagttccattgtgtacaaatgatcagattcctgcaggcaaatttctggtgctatggagtaaccaagaccatgctttaccatctctttgcaagtctcttgtcgatccacttccattgcaataatgggggcttgttttagattcgtatgcatccaatcttctataatcgtttttaaagaagcatccgttttatatttgataaaaggtaaaaaaggaagttgctctatcgttattggtttttttgagatgatatgtaatttttcccgtgtcagccgttcctccacccctttccagcgatggcttcctctcagtataccgacttgtacaataccagcatctaataatttcatgacatctgtgctccagcctgtttgtacactatattggacattaggatacatagtggaaaattcccttaataacttagggagcttatattgagcgaaattgcttgatacccccagccttagatgtccttgcacctctttgcttagattagagatatgatctttggtatcttgaagttcctgtagcattcttcttgcataagcaaccaagtgttctccttccgcagtaaaggtaattcctttatgccttttggtgaataattcaattccgaaaatctcctcaatctttttcaaccgataagtgatggaaggctgtgatgtaaataatcgttctgctgtttttgttacactttgttcttcgtgaagaattttcaataaaatccaatctttctcatccattttcatcttcctttctagtccttctttcacaattataaaagtttttttatcgaatattaagaaaacttatattttatttttatttttttaccttctacactaaaaaacataaaaaatactacctttaagatgaggatgatgacgatggtcaagacgaatgtaacaatcatgagaggcggaacaagcaaaggcgtttttttccacgaatcagccatgcctaacaataaaaacgaatgggagccctttttgcttgatgtcatgggaagtcctgataaaagacaaatagatggtttgggtggcggtaattcccttactagtaaagtggcaataataaagaaagcatatacttcggatattgatgttcactatactttcggtcaagtcagcatttcggaagaaaaggtggactttaaggggaactgcggaaatatctccgctgctgttggtccatttgctattgaagaaggacttgtaaaagcgaaagaaccaatgactgcggtaaggatcctgaataccaatacgaataaaatgatcattgcggaagtagaagtggaagacggtcaggtcaaatatgacggagatgttacgatatctggagtacctggatctggatctccaatctatttaaactttcatgatgccgctggttcagttaccggtcatttattgcctactggaaatagttcggagtttttagatacaagtcaaggccaaatagaggtgtctattatcgactatgcaaatccattagtttttgtggaagcgagcagtatcggcctggatggaacggaacttgcagaagaatttactgatctacagttggctcaatttgaagaattaagatccattgcggcagagaaatgcggctttgccagtcgattttcagctacaaagttatcgccggctgtccccaaactggctatagtagcaaaaccagagaaatataaagatagtacaggtgcttggcattcaagcgttgagatggacttacacatcaggatgatgtccatgcaaaagccacatcaagcactggctgtcactggagcgatatgtacaacaagagccctttcagtggaaggtgcaatccctgcaagaatagcaaaaaaccactctacaaaggttcggctagctcattcttctggtattattgaaacaatggtggagcccactggtataaagatcgtccgtaccgcacgacgtattatggacggaacagtttatacgcatggagactatcaaatgatgtagatggactgtgcaaaaagcctcccccctttccatcgttaatagatggattgaatgcgccttcttgcacagatccattgtaatcttgcatggctttaaaaaagcctctatattgttttttatgaaatcgccaaggtcctttcatgtatctgcctcaagcatgacataatcattatagagaaaattgaatactttttactgcaaataaaaagataccaacatcattggtatcttttagattgagttcatctgcagcggtttcttttcctcactgcttatttgattacaaaattaccgtactcgtttgaacgaacatgaatcggtccgtttagattatagttgttctccttggcgatagagcgaagcacgtccacacgggcaactgattctctccattcgtcacgggtgtcatgattggccggattcatcagatcgtcatagcgtacgtccaagaatttattcaaccacttcttctcgtctattccgtctttaggtgatccgcccgcttttttgttcgtacgtttaatcaaggcataaaaagagtcagggtcatcaccatcgccatgctgaataaccgtatcgtacatcacagctcttgccaatgctgtttttagtccggcattatccgatcgtttcatggcaggctgataatacaaatggtcatttactttgtcttgagcggcgcgaaattccttatcatttgcaagcgacttccaggcagaagcgaatcccttgagattgcttgtatcatcgctttcttccttggccagacggcgcaattcaggcagatactttttcagtttgttattcggaactgcctttgtgtatacttccactacttccaatgcatccccggtagccgttgtaaagcctgcccgtccgcatgtatagcctcgcccgtcatccaatcgctctacatatccatattggatctccgttgtgccgttttcaaagatacttgtcagctgttccgcccggcgcttttgatctttattcagtcccgccgcaaaaaccgtttcgctcatcatcagggtaaaaaacatggtgaaaacaagtaatgagatcgctgcttttttccaaaaatctgctttttgcatactgattttcatttcacttcccctttctaaatattgtaaatacagactcagtatacatgaagaaactgccctattgttgaaaatacatcaatttgtcaatattttgaatctaaagtaatatagcttgaatcttactctattcattgccaatcagccttagcccctctcactgggaaggtcccttgattttcatactgcttcaactttcattaacaagatgccataaggctttactctattttataatggaagtgatcatcgaaaatcgttagggaggtgatgtaatggcaagcaagatgagaatgccagattccgcaacgtcccatgcaaagcctactattgggaaggcgatactttgcatggggtagactttctaaaagatcgcccaagtaagcttttctgatatagtggctttgcaccttatttgacataaaaaaataaggagctggcagaaatggcatatgtaaaagcaaccgctattttacctgaaaagctgatatcggaaattcaaaagtatgttcaaggaaaaacaatatatatccctaaacctgaatcctctcatcaaaaatggggtgcgtgttcaggaacaagaaagctgatcgatgacagaaacgcttctattaaaaaagcatttaaaaacggcaaaaccattcatcaattatctgatgaatatcacctctctattgaaacaataaaaaaaattgtctactctaaataaacaaaacggaagcactgataaaaaataatcagtgctttttatatggcgagtttgtttcttagttatttcctgcatatgataccattggccaattgtgtaaagttaagggagatgagaagaaaggaaggtcctacaaatgacgataaacaatggaacgttgcaagtacccggcgcgaacatccactatcaggtgcgtggctctggtccaatcattcttttggtccacggaggaggcggtgatgccgacaagttccatcatgttgccaatcatctggctaactggtacacggttgttacttatgatcgccgcggccattcccgcagcaatctcgccaatcagattgagggttaccgtgtggaaacacacagtgacgatgctcaccgtcttctagccaaaatcaccaataagccggcctatgtatttggaagcagctccggggctgttatcgggcttgatctgtgcatacgccatcccgaacaagtacatgtcatgatcccacacgaaccaatcttattgcagcttctgcatggaaatgagctgaaacaagccgagcaattcatggaagaccttaagaaaaatcatcgaagtgaagtcattaaattaatgtcaagattagagacagacgaacaatcaaaggctgtcctgacaaagcggcttctcggcaattcaacgtatttcactgagtatgaaattcaaggaattctcagctatacattagatttcgaagcattaaaaactgtgtttacatcttcaccgatgaagatactcccagctggcggaagtgcttctcgggagctttttccttatcgttgcgcgaacgccctagcggaacaattggaaacagaatgggttgaattccccggaaatcatacggggtacacaatgtaccataaagaattttctgagaggttacacgacatgttagaaaaagaaaagaaacatacgtgttaaggattgattaaaattttcaaaataggacaggtgaaactaactatggaattggagaagatttcacgaagcgtaaaaagaacttttcactaacgagaacgcaatgtgagatgtttaaccaaagtgatattagggatttcatcgaaaaataggtttgtacattacgttctcctattgattatttcctatcttaattccgtattttataccattagatacaactctaaagcggctcgttattttgtcctcaacaacaaccagtgtctaacatcatgaatctcttttgaaaatcaccacaaatgcaggtatggaagacttcatcgcagcaaaaaccataccaactattgttgttggtatggttcgtcctagataggcccttaagaagagattctattgtacggagtatttagctaattgcatttgtaaccgacagggccgtctgaacctgtgtacacatatgtgtcagacacatatccaatattcacgacaccccgggaatctttccactggatttggtcccagatattactcgttccatacttccctgtaacagtcgttccataagcgtaacaataataaggaacacgggagccactcggaatggaaagcataataggataatttgtaccaggaccgctgcgcatattgacaggcgcaccgctgcttgttgagacagtaaagtactgaacggcaagtgcctgactggaaaaaatgaataaagatgcaatcatcacggttaacatactcagcattttcagtttagtcaatgtcatccctctttcttcaattccttcattttaagaaacgatagaacataggctaccagctgcatttaggaacaaccggaccgtctgagcctgtatacatatatgtatcagagacaaatccaggaacgatctccccgctggcaagcgtccgctctgtgtaattccaaatattgctcgttccatactttccagttacagttgtaccggttttgtagcaatagatcgggatgcgggttccgctcggaatggtcgttacaattccccaacttgtacctgggccgctgcgcatgttgacaggagcaccgctgcttgttgaaaccgtataatactgagccgcaagtgcatggctagaaaaaatgaacacagatgcaatcatcaccgttagcatacttagcctctttaacttattcaccttataccctccccttataaatgccgtacgtttgactttcttacatccagttaaggatttactttcagataccatgccccctcccctcccatatatttatcaatgtaccataaactagatctttcaaaagtggaattattcctatgttttcgacaattaaggatacaaaataaatggtagtcaggcttgatattgatggtgtgttacatttggctcttaatcatttgtccagtcggtaatcacgattgacaatcaggaaaaaggacatggatcaagcggcttcgtttccaccaattaactcaatcagtgtactgcttccttgtatccacgcttcttctcgattcatagatactccacctttttcaccaatcaaaaacggacaccatacaaatcagcgtaaatgctgcaagttcagtgtccgcaacctattatgactttgctttcttttaccagggcgtgtaaaaatgattaggtacgttatcaaacgttattctatgattttgcgagtcaaaaaatcataacattttatatatttcaatcagattatgatctggatctctgaagtgagcaactcgggcactccattccttgcgatcatgcggtttattctcacatttaactcctttttcgtgtaaatcgtcatacgttttatcaacatcttctaccttaaactgaagcaaaaattttgattgagcttctccttccaaggactttttttcctctccaacgatttcagccatcgtttctcgagataaaagctctattttcgtttccccattatcaaagagtgcatattccatttcattctctaaccaacttattggaagtcctaatgaatctttataaaactcgacgcttttcttaaaatcattcaccaacagtctaatttgtaacagcttcatatcgagtgcctcctataaaaccatacttttactggtcatccaatttaatgataccaaagaaacctgacagcactatgtcaagtttccatacttcacccttatttcagatttaagtgcagtttagtccatgtcataagaacgagcaaaaacagcgattcttaaaacaaaaaatgataccgagtgtattttctgtatgcttcaacttcatttcgggaaatgtaacgttgataaaaggaggttacatcaatatggatcatcaaacattggcagctcatgaggctgttgacttacatgaaatcgtgaactttaaaacactttgtatagcgaaatcaaagttaatgcaagggcttgtgtttgaccaagaactgaaggacttgatggaaaaagatgtacagcaatccattcaagaccttactgaattacaagcggtttatgagcgtgcctcatttcaggcccctgtccctcaaagccgcccaacgccaatcatcaattgaaagggaggtaagcctctttgaataatgatcatttagaccccattaattcgctgaatgtgcctgaactagcagacactacattcgcgatggattttcttatacgagctaaggaaggcgtaaggaatactgctgtagctttgacagaaaccgcttcaccagatgtaagagcactgcttcggaaacagctgatgcaaggaattgcgatgcaccaagagattacggaactgatgatcagcaaaaagtggttccatccatatgagctgagcgaacagtataagctggatcagctctctgcaaaaaacacgatcatggtcggcaatatgaacctctttcctgatgaaacaaatcgcaaagggatgtttgaccggacacctgatgaacactaacactggaggttttacagcatgaaggcagtaacgtatcaaggcattaaaaatgttgttgtcaaagatgtccccgatccaaagattgaaaaatccgatgacatgattatcaaagtcaccagtacagccatttgcggatcagatttacatttaatccatggattcattccgaatatgcaagaagactatgtcatcggccatgaaccgatgggaatcgtcgaagaagttggttctggggtgactaaactaaaaaagggagatcgggtaattattccctttaatatagcatgcggggaatgctttttttgtaaaaaccagctggaaagccaatgtgatcagtctaatgacaatggggaaatgggtgcttatttcggctattcagggcaaactggcggttatccaggcgggcaagctgaatatttaagagtgccgtttgcgaattttacccattttaaaatccctgaatcttgtgaggaacccgatgagaaattaagcgtgattgccgatgccatgaccaccggcttttggagtgtggataatgccggcgtaaaaaaaggcgatacagttatcgttctcggctgcggaccagtcggcctgtttgctcaaaagttttgttggctaaaaggcgcaaaacgcgtcatagcagttgactatgtaaactatcgcttacagcatgcgaaacgtacaaacaaagtagaaatcgttaattttgaagaccatgagaatacagggaattatttaaaggaaatcacgaaaggcggagcggatgtagtcattgacgctgttgggatggatggtaaaatgagcgatctcgagttccttgccagcggcttaaagcttcatggcggaacgatgagtgcattggtcattgcttcccaagctgttcgcaaaggaggaaccatacaaattacaggtgtgtatggaggcagatataacggttttccgttaggagatattatgcagcgaaacgtcaatatacgctctggacaggctccagtgatccactatatgccgtacatgtttgaactagtatcgacaggcaaaattgatccgggagatgttgtcagccatgtcctgccgcttagtgaagccaagcatggctatgacatttttgattcaaaaatggatgattgtatcaaagttgtgttaaagccttaaaaaacggaggttacagaaatggaatacgccttacacgaagtgcttgaggttcaggaaatgactgcatttaagacactttgtttgacgaaatctaaaacaatgaaagcactggtatctgatccgaagctgaaagaaatcatgcagcaagatgttgatatcaccacacgccagttgcaggaatttgcctctattttatctaatgcaaagcaagaatgaggagatgaataaatcatgaatcctatcatagaatatctgactggcatgaatgttctaacagaccaaatcattgctatggacttattaatttcagcaaagaacggagtcagaaattatgcgatggcagccactgaagccggaacgcctgaagtaaaagaggtccttatccgccatttggaagaagcactcgatatgcacgaacaactctcaagctatatgatggaaaaaggctggtaccatccttggaaccctgacgaacaagtcaagctgaatttaaaaaatattgatacagccattcaattgccaaccctttaacatacaatgactgatttgctgaggaacagtattgattggccacaactgttcctcagcttcaaaatgagcactgtttgttcgggtcctatgaccgtaaatagattaaccgcttttctccatctgatctccgataatgtttgcaaattctccaatccaaataaggaatcgtaaccacctctttttatgcgatctcttgatggagaaaacaggccagaaacaaaatccttcgtttttgacctgccctcttcacacgcaaagaatgctaccttctttgctccactgatccgtgaagactttccgttttaggcctgcttttgagctttgcctcattttcacgcaatttcccatcataatctttaatttttgtgtctaatctcttaattgtttcatcaatttctttccgcttctctatcagccgctgtcgttcgtcagccaggatattttttcgagcttctaccgtacggtcaccttcggtaaataatgttgtatattcaattagcgcttctatcgatagtcccgcatttcgcatgcatttaatgaattcaatccatttgatatcttcttcatcatagtcgcgaatgccgctgtcttttcgttttacaggcgggattaatcctacacgttcgtaatatcggagtgttgcggctgtcaggccaaactgctttgccacctgagcaatattcatgatcttcacctctctatcctgtatgttgtgaaggtaacacttaaagttaactttaagtcaagctcaaaacaagtggttagctgctgaatctgggtttatatattcgggacttgccttaaagcacactttaaactctatacttctccatgcactaaaaacagtgtagttggagggattgctgaatggcaaataaacacactgccggaagagaacaattaggagaatttgcgccaaagtttgctgaacttcatgatgatgttctattcggtgacatttgggcaagagaagaagaactttcatcccgggatcgcagcatgattacagtttctgcattaattactgactgtttctcagcttataaatcaggttcattttaaatggtttttttaaaaaacccttgccttaaagcagactttaaggtttatcgttatgttgaagacaccataaaacataaataagtgcatgtttttatttacaacacttatgatgaagaaaggataggttcgtatgtgtaatcaacatcaaacccgtgtattaagcgtgtcacatgcaaaagccaaatttgaacaaacgacgattgagcgaagaggattacggccgcacgatgtcttaatcgatattaaattcagcggcatttgccattcagacattcatagcgcttttgatgaatggggcggtggcatcttcccaatggtgcctggacatgaaatagccggtgttgtaacagccgttggaacaaaagtcaccaagttggctgtcggggaccgcgttggtgtcggctgttttgttgactcttgcggagaatgcgaatactgtctcaacgcagaggaacaattctgcacgaagggtgttgttcaaacgtataactcagtagactacgacggaaaccccacttatggcgggtacagccaaaaaatcgttgtcactgacagatttgttgttcgcataccagatcgtttggaaatggatgttgccagtccgctgttgtgtgcaggtatcacaacgtattccccgctgaaacactggaatgttggccctggtaaaaaggttgcgattgtaggcgtaggtggccttggacatttggcaattcaatttgcacatgcgatgggtgcagaagtaaccgtcctgagccgttccatgaataagaaagaggaagctctggaactcggtgcaaatcattactttgcaacaagtgacccagccacattcactgcattggccgggcgttttgacgtgatcttaaatacggtatcggcaaatctcgatgtagatgcctatttatcaatgcttcgtatagacgggacacttgtaagcgttggagctcctgccaagccggacacatacagtgtgttttccctaatcatggggcgccgcagcattgcaggttctctagtcggcggaattcaagaaactcaagagatgctggatttcgcagctgagcatggcatcgaacctaaaatcgaagtcatcggagctgaccaagtggacgaggcatacgaacgtatcctccgaagcgatgtccgttatcgatttgtgattgatatttccacattgtaataggttagtccttatatgggctgccgcttttattgaaactcacgaaaaatgatctctttaagcaaatattttgaaggccggtcaatcttcctgttattctatgaatagagagttattaggagggttttttatgagcaaaaaaattgcagttcttgttacagaccaattcgaagacatcgaatatacaagtccggtaaaagcatacgaagaagctggctacagtgttgtggctatcgatttggaagccggcaaagaagttaccggtaagcatggcgagaaagtaaagattgacaaagccatctctgatgtggatgcaagtgactttgatgcacttttaattcctgggggattctctccggatttgcttcgtgcagatgaccgtccgggtgaattcgcaaaagcatttgtcgaaaacaaaaaacctgttttcgcaatttgccacggcccgcaagtactgattgatacggatcttctaaaaggcaaagatatcacaggctaccgcagcatccgcaaagatttaatcaatgccggtgcaaactacaaagatgcagaagtagtcgtcagccacaacattgtcacaagcagaacacctgatgatttggaagcatttaaccgcgaatctttaaacttgttaaaataacaagaaggcacagactgttcgggtctgtgccttttttaaaattaagactccttcgttacattctgaaagacagcagtcgcgtcccacacattcaagccaaattggccttctgaaaatacggaatcatgtgcatcaatcacaagacgatcatctaaatagattttaaagcgatcgccctcggcctctgttttcagatgatactttttattaacgtctatcggtgttttgtattcagcaatgacagaagcagcaccgttctcaaatttaaagaatttcactaggtcatgcttcgcatccacattggcaaggtaaccgtttttggcatctttgtcagagcgaaacattagtgctcctgcccctcttccgtttccatccttaatggtgatatcagattcataagtgaagtctgacccggatgctgaagacaagataaaggaatcgccgtccgacctcccttgtttcccctcaattgtgtctgcccacgtgccatttacagtcgtccagccagtcatattggacataaaaggtgtcgttccccataccttttttaaagggtgtatcgttaaagattttacctttacaccgccatttgcagcatataattcaagccctttgcttgatcggtctgggagaataatatccgttatgacctgctttccgtcattcccaaatacttcaaccgaggagcggtcaacaaaaatgcgcaacttaaccttcccatttaccggcttcaacggggctgtttcttttccggtgttaaaggccggattaaaggtgtcgttgcctgactcgctccggtcaacgaacaatttggcgttccttcggtcatagccgaccttcgtaaattgattttcacctgttcggaccttaaaaccaaattcagcagctgaaccagggcttactttaaattctgcatttatttcataggcatctccagattgccccgctaacacattatgacttgcaggcgatatggtcagattcttccacttcttagaggttccgcgaatggtttccagctctttcaccggtgtttggaccactctaaccccttcggtaaacgctttcaattttaactctcttggaatggacgttgcacttctccatggggatgtcggaacatcattcgcatattgccaattgctcatccaccctaaccatagccggcggctgtctgtggatggaatatcagaccaggatacagccgcataaaagtctctgccgtaatccgtccagagaactttgtttggcgggttttcatttttaaaatgagttccatcaaagtcccctacaaaatattgcatgcctgatcctcccgagaccgctccgtttccgacactgacctgcatgacccatttcttttgattcggattgccgtctaccggaagctcaaataaatccgggcattcccatactcccccgtggcttccttgatcctgtccaaattcacttgcatacgtccactgcttcagattttttgatgtataaatgaggattcggtcaccggccgcaagcaccatcacccactttttttctttctcataccaaaagacttttggatcgcgaaaatcttttttacccgggtttggaatgacagggttgccagcgtacttcgtccatgttcttcctttgtcgttgctataggcaatactttgcacttgatggccttcccgatcctgtgtataaatggccacaagcggcttctctttgcctgtttgaaaaccgcttgtgttatttttatctacaactgcgcttccagaaaagatcgtgcctttttcatccggatacagcgcaacaggaaggtgttcccatgtaaccaaatctttgctgacggcatgcccccaatgcatgggcccccactgaagcccgtatggatggtattgatagaacaagtgatattccccagcataatataccattccgtttgggtcattcatccagtttgcctccggtgtgaagtgatattgaggacggtaatcctcatcatagtagcttgaatcggctgcatctgccgaaaatgccatagtcaacagcagggtgaacatgatcatgacttgaatcagtctctttttcatttgttccttcgctcctctcttcatgtttgaacactttcaaaagagactgctgcgcaagctggtccgtttctggcaattctcctctgtttcactgttatccgaatgatttatatatgaaaagactgctgcagtttctctctctttccttcacacaccttatgctaagaatccagcccaatacccgagaatcccgatgacaaagatgccgcaaataatgagaagtggattcacccctttgcgaagcatccatgccaccaataacgttaatccgagaggcagcgcccccggcataatgctatctagcacgttttgtaccgtttgaacatctacttttccgctttcatccttaatcctggatacaacgattggaatgttgatggtggtccatttggacacgagagcccccataacaaataacccgagaatcgaagcgccctctgtaagcttttgaatgcgattccccgctaaatcctgaagaatctccattcctttcacatagccatactttaatccgtaatattttgtgcttaatcttatggcattcagcaagaaaaagaatagcaaaggaccggcaatgtttcctcctaaagcaagggaggctcctagcgcagctaagacaggacgaatcgttccccaaaaaattggatcgcctacgcccgctattggtcccatcaaaccgattttcattccgcttatcgcttttccgtcaattcctttattgttcgccatttcttcttccatggctgccgtcacgccaaatataggcgctgtcagccacggatgtgtattaaaccattccaaatgccgctgtaaggcttcgtttcttttcgctccgggaccgtacaattttttgatcgccggtatcatgacataacaatatcccattgcctgcacacgttcgaagttaaaggaaccgagtaaaaaatttgaacgaataaacatgctgaaaatttctttcttcgttaatcgtttttctttctccattttttcttccccctcatcgtttaggcatcaagatcatcatcatcgtcatcataaacagcaacactgccactgtctgatgcggccgcgactgctccgtgagcgctttgtttttgcatcacctgctggtataaaagcgccagacagagaccaagggctccaaatcccactaagttaaaatcggtaaacgccgctaataagaaaccaatatagaaaaatggctttaaataaggaatattcatcatattgatcaccatggcatacccgacaaccacaataatgcctccgcctatttgcagtccttttgtaatgacatcaggaatatttcccaggaacgcctgaacagcgctgacactaattaaagcaacaatcaatgtaggaatcatgacgcgcaaagcttgaaacaccatcgcggtaatatgcataatttcaattccttttatatttcccgcttttgcatattgatcagcgcggtggatgaaaaagacagtgatcgtccgaacaaaaatcgtcagcgcctgacccgcagctgctaaagcaacagcgacagcaatcccttcgccaattccttgatcagcggtaataactaaaatggttgagatgacagaggcgatcgctgtatcaggtgccatggcaagcccgacgttcatccagccgagcgccatcagctccagtgtgcctccaagaataattcccgtttttaagtccccgagcaccaagccaaccaacgtacaggccactagcggccggtgtgtctgcccttcatccaatacacttgcgattccggtgattgctgcaatgattaacaacaaaataatttgtaatgaagacatattctcatccccttgattattttgttacgttccgtaaaatctgtacaaaatcctcactggcatctgaaggcagctgcctcaattccagtttcacgcccttgtcacttaatgtttcaaatgcctttatatcttgttctgtgacactgactgattttgtgatttgcctgcgatgattttcaaaacgcattcccccgacgtttacggttttgatcggtacacctgcttctataagagatacaatatcggacggattttcaaacaagagcattgccgttaccccttcgtagcgcggactatgaaatgcttttgccattttagaaaccgagacggcactcgcctttacatttgaaggcgcaacagaaaggatcagcgtttttctcatttcgtcctgagcaatatcgtcggagacaacgatgattcggtcggctgcatggacttttatccaccttgtcaggatttggccgtgaataaagcggtcatcaattcttgctaacacaatgttcatcataattcatcctctcttgtatcttgattggctgtttttactttttctaaatgttcactgcacacttgaaagctttgctgactcattgcttttaagttgttcagcaaatctttgagagccagatgttctctcaggcttaatacctccagcagaatcggcaggtttacgccggcagccatatccattctttgatcctcagcaataaaggaagctgccgcgttatatggcgtccctccaaaaatatcgactaaaaaaagcacttcatgttcttccgggatatccttgagcgcctgatgatatttttcttgcagcgtttgtattccttcccctttgaaaaacggcactgcaatcaggttattttcttcaccgaatatcatccctgaagactcttttaatgctatgggaaaatctccatgaccgctgataataactgaaatcatatctattgctcctttcctgttttgtacatccatatataatgcaaggatcgtgccaacacagttgtgttaagcgttttcattgttatttcagccaatagcaatttgttgttgaaacacttaaaacgaaaaaaataaacctgtattaaaatggtgttccatttaatacaggttcatatgaaaaaactgtttttaaaacagctggccatgcacttcttcagcaaatatggcggctataaataatttttcatcatcacttatgcgaagtccgagcttttcttcataaggggctaatgttcgctctgtcacgtacaccatttccttcagctgatcattgatctcttcttcctctgagaaagcgatcggattctgcttaattaccctttcaaaggcgaaagccgtgtgcataatgactttgatcaaaaccgcattattgaaaatgacccccagctcatcctgaacggtttgcagccactccaataacatgtcgatcacatggtggggattcaagaagacaaggtattttttcaggctatcctcgcaaagctccctgacaataatatttgcttcgttcaatccattgctcaaggagatgcttccttttgtaatcgcctgttgaatcagcttctctccctccccttcaattaacacttctaaagatacatgcggagcattgattttagggtctttcgttccgactgtcgcaaggatttcatactctttttcgatttcttttatgctgttggccagcttaatcgatgatacggtcaatatgtgaatgggggtatcggaggccttgtttacgatcgtggttagaatgtcttccagctttttggccgttccgctacccgtcgtgcagatggataccaatgccttctttttgccggatgccgctggctgacgctcccacaactcgataaaatccttcgtgaccgattgatagatcgcatgcaaatttaaattcaaatagttgacctttctgacagcatccagcaccattgaagtcgtaacattgctgatcgttttaatagaaatgcctgtcttttcctccagcctgctttccagcattgcaagcgaccccatatctaccagcattaaaacaccttcaccttcatcaacctgtttcattttttctgctacgcattcaagaatgtccgaaggtgaaacagtaagcggcatgtcaactgctgcaatcggcgtactccctagcagttctgtcgcgacttcaaccattgaactcgccgtgctgtttccatgagctgccacgataataccgactcttttgttctcctttaacgatttgatggaatgaattaacatcgttaagtagatgacttctatttcaggaatagccactttaaaatattcctgaattttatctttaaaaatcatcgccacccgatattctttcacatgggtatcacgaatttcatctgtctcctgtgtattcaaaacatcaatttgctttcctcgctttaaaaatgcgtcaatatgcatactcaagaaataaataaacttacggtcaaatgtgcaatccagctcatgttcagctatttcttttaactgttttgtcatttgaatcacatcgtcttcaacgaatgtcagcaggttgtctttttgaaaagcttgatgatgaaaaaaacttctgacatgcaaatggacatcagtcaagatgtactggttaatatcctttttggataaaccttctttcataagcgttttcactttttcctcaatcaaatgatataagttaaatgagaggtcttcgtcaatttttgttgtttcatcttctacaatcggagagataatcgttgtaatattgacatattcagaaatggctttgcttctttgcatgtttttgctgctggacatccattcttgcttgatttcatcaggcagatcgcgaacagtcagttcaataacttcatttctgtcaaggttatgcaaaaatccgtgtgcgcaaactaactgaacatttgatttcagctgtccgacattcccaaatttcgcagagtgaataagcgcattatagacatcgatatgcacactcagattcttcttaattcgctctgcttctttccctaataaaaacgtcgtcagatccactctttcattaagcgatcgttcttcaagcgaaggaatatgaatggtcattgggattcttcgcaaaaacgttttcaatagtgcagaactcggattttctgtagtcgcacaaataaacaatacgttcgatgttcgtttatgttcagattctccaagcctgttataagaaccgctgtcaataaaataaaacagcatttcttgtccctcgggagggagacggtggatttcatccataaaaagaatgcccccattggcctgttcgactaaacccgccttatcctcggcagcacctgtaaatgaaccttttttgtgtccgaataattgagaaagcaataattgagggttgttgtagtagtctgcacagttaaatgtaataaatggtgcgccggccttcaatatgtcagagtaaatggcaaactggtaaattcggttcgcaaaaagggatttaccggaaccagtcggccctaggaggagcatatgcagaccgttcggcggataaaagacagctgcttttgcctgggagatcgctttcttcaaactcccttttgcccctatcataagctctaggggattcgtggaaatgtgttgatgattttgctttgaatttccggaaaacgcctgaaggtctttcacttccatcatctctgtatcccatttcttgttgaataatttttctgctatctcgactgggatgtatcttacaggaaatgttttaattttgatgacctttttggaccggacgagattgttcaattcaaagctgacattggaccgctccattttcagctgctcggcaatctcctttgctgaattcccttgtatttttaaaagatgatctaaggttgaatcatgaaaattatgcttgagctgatggtatattttatctattcttctcacgtctatcatcctttgtccttattagataagccattaacaagaatatttcgaaactttatagtccgcgttgagatttacacgtttaaaaaggtctctatagcagattgacaaagctggcttttatgcgtatatgtttacatgttgaatcatttgcacctcatattagtatgatagatgctcagttctggagggccagtccccttcaaaagtaataatcagtaaacagtttatcattctcggggaatgtaatgatgtcaaaataatcaatgacaaaaaatgaatcttatagatcatgacaaattacccaaatataaccccttaagttcgttcacaactaaaaagacggacactctatgtgaccgccacagtattacaatttgcaaaacttcgtcatttttgcaatccacattggaggttaaggaatctgtaagcttaaaaactttatctccgatcctatcgatttgatccccctgccggcctcaatcatagtgggtatgcaattatacaaatcgttaccgattaaaactagcctgtcagattgtccaaatgactttcctgttttactctgctattcaggtagaatcacgagtgaaaaatagagccacaagacatgtaacagcacttaaaatagttttaaaatttaaaaataaaagtatctattcttttaaatgttataatatccgataaaactttactcatctttttattactggaggaaaataaaattgataggcaattctagcaaagacaattttggccagcaacagaaattgtctagaggccttaaaaacaggcatatacaattaatggcgattggaggtgcaatcggtacaggtttatttttaggttcaggtaaatccatccattttgcaggaccatccattttatttgcttacttgatcaccggcgtattttgctttttcattatgcgttcgctcggagaactgctcttatcaaatgcgggataccactcttttgttgattttgtaagggactatttaggaaacatggcagcatttatcactgggtggacctactggttctgttggatttccctcgcgatggctgatttaacggcggtcggcatttatacgcaatattggcttcccgatgtgcctcaatggctgccgggtcttcttgcgcttattatcctgctgatcatgaaccttgccaccgttaaacttttcggagaattagaattttggtttgcattgatcaaagtcattgccatactggctctgatcgtaactggtattctcctgattgcgaaaggtttttccgcagcttccggccctgccagcctcaacaacctttggagccacggcggcatgttcccaaatggatggcatgggtttatcctatctttccaaatggtcgtcttcgctttcgtgggtattgaacttgttggactgacagcaggtgaaacagaaaatccccaaaaagtgatccctaaagccatcaatcaaattcctgtccggattttacttttttatgttggcgcacttttcgtgattatgtgtatctatccttggaatgtgttgaatccaaacgaaagcccatttgttcaggtcttctctgcagtaggcatcgttgtggctgccagtttgatcaattttgttgtattaacatcagccgcatcagctgcaaatagcgctttattcagcacaagccgaatggtctattcacttgcaaaggatcatcacgcacctggactattaaagaaattaacttcttctaacgtgccaagcaatgcgctgttcttttcatccatcgccattctgattggcgttagtctgaattatttaatgcccgagcaagtcttcacgctgattacaagtgtttcaacaatatgcttcatttttatttggggcatcacggtgatttgccatttgaaatatcgaaaaacaaggcagcatgaagcgaaagcaaacaaatttaaaatgcctttttacccattatccaactatttaacacttgcatttctcgcgttcattcttgtcatattggcactggcgaatgatacacgtattgctttgtttgtcaccccggtctggtttgttttattgattattttgtataaggtgcaaacccgcagaggacataaggtgaaataaaaaaaagacaagggatactcactcccttgtctttttatatgtgtcaaacactaaattaaactttggtttcaaatttcattcacttcatttaagtgttaactcaaaccagttttgatgccgaaacctactaatattattccggtaattttttgaaacactttctggaacttcgagtttttcatccatttttttgcgtaatcaataatataaacaagaaacaggaaccacaacaccgctaataaggttaggattgaagctaaaatgatgagctgctggtttatatttccgttcaaattgataaattggggcatgattgtaacatacaccaaaacagttttaggattgagaatgttactgagtgatccctgcataaaggaagttttataataacgtttcggagaacttgccatattttttgcttgggattgcatgtcatctaacgaaaacatacttttagcaaaaaaactttttacacctaaataaattaagtatgccgctcccaaatatttgatcgttgtgaaaagaatcactgactttgcgattaccactgataatcctaaaatggcaatcaccgtccaaaaggaaagtcctgtcgccaatccgagaatgttataacggccggctttcggaccatacctaagcgtatttttcatcacaagcatcgtatctgcccccggtatgataaccatcatggcagcgatcggtatgtatgcgagtaagctgtgcattgttctctccccctttaaaaatcccctcaatcatatagtgactacaaaagtaactacttataaaagtgtatcaatgcgtttggaataaatcaatatgatttgttaaaatagcgattactaaggcagcgattgctctttatattggaggatatatgaaagaaaatatgttagacattttaaaaaacctcaattttacagaatatgaatcgaaagcgtatttagcattattgcaagaatcacctttaacaggctatgccgttgccaaaaaatccggagtgccccgttctaaaatttatgaagtattggaaagtcttgtcataaggggagatgtttttgtcagtcatggaaatacgcctcagtatgttccagtccccgcaaaagaactgattaaaaaccgccggctcaaagcggaagagcattttgatcaggctgagaaatattttgaaaagttcgagcagaccgcaaatgaccgggaaaacatctggaatatcaccggccgcagtgaaattcttgaaaaggtgaaggcttgtatcttatctgccaaaaaaagaatcctcttagaaatatggaaagaggattttaaggagatagaagcagagctcaaacaggcggcagaacaaggcgttattgtcaccattattgcgtacggagacatcgtatctgattttgccaatgtttaccttcatgatatgagcagtgaaattacagaagagtatgacggacggtggcttgtctatagcggagatgattcagaagtagtagcgggcattgtctcacttggcaacgacagccgtgctgcatggacgatgcatgtagggttagtcatgcctattactgaagtgatcattcatgatctgtacctcatggaaattctgaaaaagcatagagagcttttagaagagagcttcgggaaaaatctcatccagttgcgccgtaaattttctattcactcagatttcaaaaaacattatttggaataatgtttgtcatctcttaccccaaaaacaaggcttgtacaaaacaagccttgtttttttatgcataaaccccccatgctgatttacttctctcttttaaaaaatgtgattctgcgcaaactatttttcagcctgccgcgtctatcctaggtaacagcctacgatatacgtatattcaaaaaggagccctttattgcaatgaagaaaaaacaaacaacaaaagcgttgcttgtcacatgcataactgaccataagcaagatttctacaggttggctttcagttatgtgaaaaatcaagatgacgcattagatattgttcaggaatctataaaaaaagcgctgagctcagttgaaacggtcaggaaccctgagacgataaaaagctggttttataaaattttagtacggacagccattgactttttgcgcaaacaaaaaaagataagagtgatggacgacgaaacgatagaatttttaagcaaaggaaaggaagaccattacaaggatactgatctccatgaagcgcttgacgaattgccgtaccgctataaaaccattattattttacgtttttttgaagacctcaaattagaagaaattgcggaaattacaggagaaaacacgaataccgtcaaaacgcgcctatacagagcattgaagctgatgcgcattcagttgacgaaggaggatctttcttaatggataagagattacagcaattaagagaagaatataaaaatgttcagattcctaaagaattggatatcattgttgaaaaagcccttcagcaagaaccaaaaaagaaaagaatcgttatgtggccgacatcagcagcaatcgctgcagctattttattcactgcgcttgttaatatcaacccggacgccgctcaggctatgtcaaagatccctgtcatcggcaaaatcgtcaaagcgatcacctttattgaaatcaaagaggaaaaagaccaatcaagcattgatgtcaaaacacctgctttgtccgggctttctaataaagagcttgaaaacagcattaacgagaaatacttgaaagaaagccagcagctgtataaagagtttatacagtccacatccaaaaacaaaaaagggcatctcagcatctacagtgattacgagacggtcacagacacgccagatttactctctatccggcgcaatattgaaacaacacaagcatcttcctacacacaaagccgttatattacaattgacaaaaagaatgatattttacttacattaaaaagcttattcaaagatgagcgctatatcaaagtcatcagtcaaaacatcaaagaacaaatgaaacagcaaatgaaggaagatccaaataaaatatattggctcactgacgaagatgcagaaccgttcaaaacgattcttcctgatcagacgttttacattactgaagaccataaacttgtgatctcatttgacgaatatgaagtcgcccccggctatatgggcgttacagagtttacaattccaaccggcgtcatttcaaacttgctcgtgggagaacgttatattcgataaaataaaaacatccatctaagattatggatgttttctctcttctctattcgaggtcgtaaccccgctatcaaaaacaacgagaatatttgcatactattggaggaatacccatgtatcacaagacacagcatcatcgatacattcctggacttgatggccttcgggctttcgccgtcctgtcagttatcacttatcacctaaatttcaattgggctaacggtggttttatcggggttgatatcttttttgttttatccggatatttgattacatctattctattaccggcatatggaaatgatatcaatcttgattttcgggatttttgggtgcgccgcattcggcggcttctcccggcagcgtaccttatgatcttttccactgttgtgtgggtcgtattgtttgatcgagaactattgcacactgtacgtggagatgcgatctcttctctcttttatatgagcaattggtggtttatttttcacaagctatcatattttgatagtttcggttccccatcacctctaaaaaacctttggtcgctggcgattgaagaacaattttatatcatatggccgatgtttttagttgttggaatgtacataatgaaaagccgcgccagattggctgcggtgatatcattgcttgtgctttgttcagccgtgatgatgagcgtactgtatgaacctggcggagatccgagccgcgtttactatggcacagacactcgttcgtttgaacttctcatcggatgtgccttggctttggtatggccgatgaaaaggctgtcttccaacaggctgccaagcaaactgaagcacactttgcacgccactgaatttttggcattttgtattttagtgttgtgtgtctatttcacagatgaatacgagccttttctttacagaggcggaatgctattcattagcgtgactgccgcaatccttattgcatgtgtttgccatccgagcagctttttaggcaatctgctttcatggaggccgcttcggtggcttggaacgaggtcttacggaatttatctttggcactaccctgttattgtgttaagcacgccagttcaagaaatcggaaaccctgttttttggcatatcgtgctaaaggtcattgtgacatgtatacttgccgagctctcctaccattttattgagaagccgatacggacacagggatttaggtcattttcccgccgtgtttttatacatagaatcaaggaatggaaaacgacatctgtcatcagcaaaatgtcaattggtttcattattttcgctatacttatttttgcaggcgggctgtcagggctagccggcgagcaaaagcaccctaccaaatggacctatagctcacaagaaacaaatgctgacaccagccaggcttctggggataaaaagaacgctgcagcagataaaaaacacaatcctgaacaaaagacaacagattccaatcagggtcaaaaggaaaacaaagatagtgggcaagagactcataaaaagaaagacacgcaatcccaacagttgaaaaaaccagcagacactgcgaaagaagttttagctataggagattccgtcatgcttgatatttcttcacacctgcgtcagtcattttcaaatgtgacgattgatggaaaggtagggagacaaatgtctcaagctttggaactcgcaagggaatacaagtcttttaatcagccgaacaaggctgtcatcattgagcttggaaccaatggctattttacaaacagccaaatcgaacaactgcttcaatctttctcaaaagctcatatttatcttgtcaatacacgggttccccgccaatgggaaagcaaggtaaatgaatctttgcagcaacaggcccacgcacatcaaaatgttacgttagttgactggcatacagaagctcttcagcatccggaatattttacccctgatggtgttcacttggttcctaaaggggcaaaaactttgactgctcttattgttcaggcgatgaaatcgtaaaaaagagatcctatacagatcacttttttactttagtttctgatcgttgattatgtcttctttcagcaaggcagcccttatgtttacatgccgtttacgtaagggtaagccaaaattgaatggagggatgataatgaaaggaaatgaagaacatgacatccaaaaagagttgaaacgatatgagctttttttcaaaaaacgatataaggttctttatacagtaaacgattttatcatcggtgctatgtttctcgttggaagttttttctttttttatgaccggttaatgtcggcagggatatggctgtttgcgatcggaagtttgctgctgttaatcaggccgaccattcggctgattcatgactttcattaccgtaagcatgtggaacagcaattcaagcatcaatcttcaacagatgactgatcttaaggaataagaaagaacaaaatgccaaaagcctgagtcgaaaatcaaaaacaagactttcagactatttatttttaaaaacaaggtaaaaagaactaaacttttgcctctgcatgccgatatgaataataaggccggcgcgatactccctataacatccttttcagtagatttcattatcgtgccggttttctcatatgcaaagcaatcccgccaatcagattggcgggattttatattttacattcctgtccaaacgtctttcacataacgtctttgatcttgcagcttttgcagccatacagctgattcttcctgacttgctgctttttcagcttcatatgccaatcgcaaagttctctctacatcaggagccatttgcgatccatcaccgcatacgtaaatatgagcccctttttcaatgagtgtcatcaatttctgcgtatcttgcttgagcaagtgctggacatatccttttggttcgttttcgacgcgcgagtagcatcggcggattgtgaccaaaccgtcctgttccgcttgatccagctcttctctgtaaaggtcgtcatggtccgggcggcggcagccgaagtataaaagtgcttcaccaagggtgcttccttccttcttcaaaaccgatcttgcctgaataaagcctctgaatggcgcaattcctgtgcccggcccgaccataatcataggcgtttcaggatcattcggcatctgaaatccggactgcggcgtacgaatgaagcaagctgctgcatcacctgtattcaattctgctaaataattagaggcgacaccccggtattcacctcggccgctccatgctgaggctttcacaactcctaccgtcatgctcacgatatttgcatgaactttcggtgagcttgaaatggaatagtatctcggttttagtgatggcaaaagtgctaaaaaccgttcaaacggcatttcgcaagcaggataatcctctaaaaaatcaagcatggtaagacgttttgcaagtacctgctctttgtaaatgccatcatctgaaacgagctgttccagctctttttgatgcggcggacaaactgtataagaggccagctcccgaagctgaagccttgatgccggttcctgcagctctacataggacgacaataaatccactactttgattggccgatccatcggcagatgagccatatgagcgcttccgcttacttttatcacatgattggactgcaaaccgaatcggctgagaacccgctgaacaagctccctgctgttctttggcaggattccgatatgatcgccttctttatatgttttaccagccggaatttccaattcaatatggcgggttgaacgcgtgctggcagctgtctggagttctcgattctctaacacaatcccttcaaacgcgccatatgctttagcaaccggcgtttccgtcgcttcactgagaaaagtaatcgataatgaaggcctgtcttctttctgggctatttcgttaatatcaaatgcgtccatcgtttccttccagaagcggttttcccaagactcgcggtggctttcaaaatcatcggcggcgtcaccttccccaatcgctgttaaacgcgatgccccctttgctttcatcatgtcatcaatcaggcggggaatccgctgatacgtgctggcccagctccggtttccgcagccgaataccgcataggaaacacctttcaattggccttcctcaagctctttcagccactctacaaatccggcagcattatcaggcggcgccccattataagaagccgttacaatgacgactgccccttcttcagggagcttgccgatataatcatcaagcggagccgtttcagctgtaaagcccatctggcggccttgagcagccagttcaccggctattccctcagctgtcccaagatttgaaccaaaaagaacaagtaaaggtgtgccgtgtttaggtttggtttcttttggctttgtttctgctttgatgtctgcctgttcttttctctgtacattgattgccgctgtttttcgcggtttcacagtaattttaaaatcatccggcttgatcgttaatgcttctttgatttttagttcgtagccagtatggtttatcaattcaaaatgctttaatacaagaccgagaaccattgtcgcttcttgaagagcaaactgcatgccaatacaagcgcgctgtccgtttccaaacggcttatacgcatggtgagggatacttgaaggatcctcaaaccgttccggacggaaatcttccgcatccggtccccaagcgttttgatcccggtgcagttttggaattaaaacagtgactggctgccctttgctgatcggatattccccgcctagaacagtatcctccttcgcatatagagaaaaagccggagctgttggatacagtctgagggtttcatttaaaaccatccgaatgtatttgagctgctggatttgtttatattcaggcgtgtcatccgttaacacgcgatccgcttcctcctgagcttttttcagtttttccggatgtgtaagcagacaataaatcgcaaaggatagcaacccgcttgttgtctcatgtccagcaattaaaaatgtgatgatttggtatcgaatgttttcgtcatccagcgtttcacccgttactggatctttggcataaagcatgagagacaagagatccttaatgttttcatccggattcgcctttcgctccgctatcattctatcaaccagggagttcatgacttctatatccttttggaactgcagcttcgttttcaccatcattttatcttgcaggcccagtcttttcgattgattcatcgcctcttttaaggcacggagcatactggtgataaacggatgctgtgaatcacggtaaaagctgttgaatcgatagttaaacccgcataacccaatcgtatcaagcgtcagacgtgtcatatcgtccgctacatcaatttcttcattagggtttaaccggctccacttttgaatcagctgggttgcgatatccagcatcatagaatgatagcctttcatcgctttttgactaaaactcggcagcaaaatgcggtgggctttttgccagttcggttcgtgcgtccagcttgtaaataagccatctcccccgaactcacgcaccttttgcaagcctttgccaaggttcttgtcaaagcgtttttcatcacacacttcagccacaagattgtggccggacacaaaaacactggatactcccggaaaatcaaaacggaaaatcggtcccaattcatcagctatccgccataaggattgagaaagctgttctttttccagatgcggaagattttttaaaggtccgtatgttttgggctgaggtattgcgcttgcctgtttcattaacatctccctttcctatttttgtgatgaatgaagcttaatggcgtcccagcagcattgttccaattcagtaattaaatcagtgtccatctctatatcacctgtttgaacgagctgatatatcttgagaaacgcccctaatacaatcgcaattaacacattagagggcaggctgcgaatcacgccttccgcttttcccttattaaaatagtcatcaagcatttgagtcagattttctatcatttttttgcttgtatgatttaagtaatgagcgtcttttttggtttcaagaaaaaaaagcgcatagtcgctctctttcgtaaactgaacgagacagcaaaatacgtggtgaaagccttctctgacaggcaattctgaaacgtcttgcttcagtttttccgtaaatcgctggatgctttcttgaaacagtacgttaacgagtgtttctttgctgtcaaaataacgatagatcgttcctgtccctacatgagcacgttcagctatcataggaatagtggtagcgtcaaaacccctttccgtaaaaagtgagactgacgctttcataatcatgtcgtatttactgctggatgcggatatcatgtaatctgacaacctccgattcgtttacggaatgaatattcattccttttgttcacaaagaatgtctgccctgtctgatatcacctctttgttctttcttctgttataagtttatatgaaaaaaactttttttaatataaagtatatgcaaaaaataaaaaattaagaaaatatacccaaatcctaatacgaggatcttggatatatttcccgagaaattttttatttaacagccacaatacatagacaggaagcacgcctgataacagaaagatccctgaaatgctggtctttcagcagttgaatatacgttttctctttttcaccggtatttgtgtcaatactgatataaaaccggccgtcaatttgaagcaccctgtaaatttctcttaatgcaagcctaatatcggtgcagctttgaaccgtatgtaaagaaaagactttattaaaggtacggtcatcaaagggaatgtcctctggatagccatgaaaaacctccccgttccccatgttctttcgattcgcacgtgatatctgtcttacctttcgttttgaaggatcaatgctttttaggctacccttttttagtttcttggttatgcttttaaagacagtgccgtttccaattccaatttctaaaattctgtcattttcttgtatatctatagagtcaatcatcatatgctcaattgttttggttagcttatatttccgagaaaataatttccaaaaatccgatcgtttatagagtctattttctagcattttaaacacctgcttttggtttcctatgtttatttattatcttaaaaaaataaacatcatcttcatttctaaaagtgaaggaaggtaccaactagacggcaatgtattgaaaaatgtttcaatagaactaaactttttcatttttttccgaaaaaaaagcagaaaacataatgttttctgccctctttctaatgccaatgataagggaatacatacagcctttgctgctgcattgccatcagcctctgctgtcggaatggatttccataaccatgtttgaaggaatgcggcatggacgcataaccatggccaatcgacggcagtcttttttgataatcgttcatcatgccatcacctgcctcacaataacgttgatttactatatgcaggcgcgcattttcttgacagctatttcgctaaacttggtccttctccattgtataatgcatcaatagttccattctaagcatatgccattcccccttcagtttttttcgttgcttttagcgccagtttgttaaataaagatgctttaactgagactctttcatttcatcataaatttgttcaatctgctgttctcgttcgaattcttccaggcttttaaaccgttttttaatcgttaacgttaaaaagaataggttaatcgtcatatcgctcaccccctttcaaagtccgcatcaagcgaaataacccgcggcacaacccttctgccgcgggcaaataaaaaccgcagacaaaagaagacaccaatgcctctactgcctgcggggagttgcgtatgtccgactattccgaatttaatgcgtgcgataagcatcggttaaggaaggacacgaactcttccacaggctgaataaaccatgaacttttacatgtgtatcacgtacaggttgacgtcgttgtctcattgtcattttggttcagcctcctttgcttttttcttactttgtaagtatatccaccaaattccattttgtaaacatctttttctaaaaatggacggaaattgtgcaaatcatcgaatggatttgcccgttggtcatgacacctgcttcatttcttttctggagcggtctttcttatgatatgcaataaaataaatgagaccgacaaatacagctccgccgatgacattaccgataaaagccggaatgatgtttccgatgaactgcccccacgtgaatgagcctgcaaaaatggcagcaggaatcacaaacatgttggcgacaacgtgctgaaatccgatagccacaaaagccatgattgggaaccagatgccaaggatttttcctgctgcgtcttgggcgccgaaagaaagccacactgcaagacatacaagccagttacagccgatggcggaaatgagaaccttgccaaagctcatatcaagctttccttgggcaacggcaatcgttttttctaaataaggacctgtttcagtcaatccaaccaaatgcccgaaaaagtaagcaacaaacaatgcgccgattaagttcataattgtgacgattccccagttaatcgctaactcttttactgatatttttctcgaaaataacgccatcgcaactgacatcatattgcctgtgatcagttcagcgccagcgagaacgacaaggatcaggccgactggaaatactgctgcaccaatcaaactggacaggctcccccattctttcggaagatcgccaattaccctgatatcaagcaaatacccaagcgcgataaatgcaccgcctaaaaaccccagcacaagcagtgacggcagcgggagctttatttttttcatccctgcttcaattgctgcttccgctatttcatccggttttcgaaaagccataataaaacgcctccattacttcttcttttctcacagttatgcaagaaaggcaataaaaaaggcagcactcaaataacctgtgtcaaaccaggcgtttgaatgctgcctaacttgtatgcatacccatacaacaatatcaagcagtatataagatattgaaagagaatatatacagttcgtgcatacattccattgctttagccttctataactgtagcaacatcatatcaaatgtgacaaatttgtgtcaatgacaaatatactagctttgcagagcttctttttgctcatctatttttcggtcaaaaacaaatacagatacagcgatgttttcctcaattttaatatcagaaaacaaatggactagcttagctcccataagttcctccattccttccggtgtttgtttggaataaaggtcttgaattaggcttgtccgggccgcatgtaccatctctcttccttcaggcgtgcgggcaataaactgctcgcttgcactcagatttccgtatagtgttgaaactgccatgttttctacaaatacagtatgaattctctcaggcccttttccgaacaattctttgcgaagttttcgaataatatcattgaattcatgaatttttttagacatgctgattaccccttccgatattgccttataaaggcttttcccggttcccctcaggacatttcacttggttaaaattttcctgccatattgtattataataaatatcacattataataaaagcagtgttgatggatttgtaataggatcttgttatgagtctatcgttttataaaaatcaaggattggtctgttagtaagacttgctagtgaactattccgccatgtgtgtttacaccttcttagaattaagggcaggtgtatctatacatggctttttttgacttcttgaaagaaagatggaggggaatatgaatatgatggacgttaagtcgatcagtgtccgtgtagacggaacagaaattcaagcacgagcaggggccacaattttagatattttaaatgaaaacggaattgagtacccgcagatttgccacgtaccagaggttgacccgattcaaacttgtgatacttgcatagtagaggcaaacggcaagctggttcgttcatgcgcgacggttgcagaaaacgggatgtctattgatctttcaggaaatcgagtgaaagaagcgcaaaccgaagcgatggaccgccttcttgaaaatcatttgctgtattgtacagtttgcgataacaacaatggaaactgtacgctgcataatacagcggaaatgatggggatcgagcatcaaaaatacccatacacgccaaaagaagatccttcttgcgcggttgatatgtctcatcctttttaccgctatgatccaaaccaatgtattgcctgcggccagtgtgttgaggtctgtcaaaaccttcaggtaaatgaaacactctcaatcgactgggaacgcgaacgccctcgcgtcatttgggatgagggagttccgatcaatgaatcttcctgtgtcagctgcggtcagtgtgtaacagtatgtccatgtaatgcactgatggaaaaatcaatgctcgggcaggctggttttatgacaggcattaaagaggacgtcatggaaccgatgattgatctcgtgaaaaatgttgaaccggggtatggcagcatttttgccatttctgaagtcgaagcggcaatgcgtgaaacgagaacgaaaaaaacgaaaactgtatgtacgttctgcggtgtcggatgttcatttgaagtatggacaaaaggacgggatattttaaagatccagcctgtttctgatgctccggttaacgcaatttccacatgtgtcaaagggaaattcggctgggattttgtcaattcaaaagagcggatcacaaagcctttaatccgtaaaaacggagcctttgtggaatcttcttgggaagaagccctcgatcttgtcgcaagcagattaggatcaattaaagagcagtacggtaaaggctctgtagggtttatttcttcttctaaaattacgaatgaagaaaactacgtcattcaaaaactagcgcgtcaggtatttgaaacaaacaacgtcgataactgctcacgctactgccagtctcctgctacagacggattgttccgcactgtcggcatgggcggtgacgccggcacgattaaagatattgccaaagcaggcctggtcatcattgtcggtgccaatccggcggaaggacacccagtgctcgcaacacgcgtcaaacgggcacacaagctccacggtcaaaaactgattgttgctgacctgcgtaaaaatgagatggctgagcgatctgatctgttcatcagccctaaacaaggcacagaccaagtttggctgatggctgttacgaaatatatgatcgaccaaggctggcacgatcaggcgtttattgatgagaacgtcaattactttgaagattataaagaaacccttaaaacgtatacgcttgattatgcagaacgcatcacaggcctttcaaaagaaaacatcattcaaattgctgaaatgattcgtgatgctgacggcacttgtgtcctttggggaatgggtgtcacacaaaatacaggcggttctgatacatcagcagccatttcaaacctgcttctcgctacgggcaactatcgccgtccaggtgccggcgcttatcctctgcgcggacacaataacgtgcaaggcgcatgtgatatgggaacattgcctggctggctgccgggatatcagcatattacagatgacaaagcacgcgctaaatttgaagaggcatatggtgtcgagattgatggaaagcctggtttagataatattcaaatgcttcatgccattgaagaaggaaaaatgaaagctatgtatcttgtcggtgaggatatggcactggtcgattcaaacgcgaaccatgtgcatgatattttatcaagccttgatttcttcgtggtacaggacatcttcctgtcaagaacagctcaatatgctgatgtcgtcttgccggccactccttcacttgaaaaagacggaacatttaccaacacagaacgccgtgtccagcgattgtatcaggcgcttccgacgcttggtgacgcaaaaccggactggtggattattcaagaggtggcaaaccgtttaggagcgaattggaattacagccatccaagtgacattttctctgaaatggcgagtctttctcctctgtttgccaaagcaagctatgaggtgcttgaaggctggaacagcttcctatggggcagcttcacaggtgaaagcacaccgcttctgtatgaagacggatttaatttccctgacaaaaaagcccgctttgccctttctgattggaccgagccagcggcatttccggaggaatatgaccttcatatcaataacggccggatgctggagcatttccacgaaggaaacatgacaaataaatcgaaaggcatccaagcgaaagtgccgaatgtattcgttgagatctcacctgagcttgcacaagagcgaggtgtttgtgacggttcgcttgtacggctcgtttctccgttcggagcagtcaaattgaacgcgctgatcacagaccgggtacggaaaaatgaactctatttgccaatgaactcgacagacaaggagtcagcgattaacttcttgacgggccctgcagctgataaacggacgaacacgcctgcttataaacagacaaaggtccgcatggaagtgcttggcggctgtgaaacagcgccgcttccaaaaacaaatccgcgcaacaaaaaacggcatccgcaaaacggagtcgaagcagaaagaaaatggaaccgccctggctatgtacatctgactgattaaacgataggaggaaaacgaatggccactccgattacgacgatcaaaaaagaaacaaaaacagctgagcaaattaagcttgaaaaaatagaagaactgaaagagctgctggcggaaaatgaggacgccgtctctaaaacgatgacgttaatgaatgaactcaatgatcttggaatttttgatgcggcaacaagcatgctcagagcgaaggaagacattgccaagattgcgcttggccaagtttcccgcgagcctgtcaccaacctcatcaacacgatgatggccgccggaggcgcattgacaaaagccgatcctgagtttacagcaaagcttttagaaagcgtaatggctgggactgaacaggcacaaagctttttaaaagaagacaagaaagtcgggattctcgacctgttaaaagcaatgaacgatcctgacatcaacagagccgtcgggttcggccttcagtttttaaaaggcatgggaaaagaacttcgagaacaataacagaaaaacagccatctctgatgatggctgtttttttattcgtcggcttcttccagacgcttcttgtaaataagtgaacggtcagcgcaaaagaaggcaccggctaaaaatacgcaatccgctaaaaacatcgtcgatttctggcctaatgttaagccttgatcagggagaactgcgcctatatataaaaaagtgctgactgcaagcaatgtaaaagcaaaatgcttgtagtcttcttttaaagatttcattctatttttgttcaaaagaatcacctgccagattcatagtatacgactattataatataatccggcggcttacagagaaagtaattctatccatttgttatatattttcaagcgcttggccgatatcttccaacaagtcttccgcatcttcaattcctacagaaattctgatcaagccgtccgtaatgccgagctcaagccggcgttctctcggaatagaggcatgtgtcattcttgcaggaacagaaattaagctttcaaccgcccccaggctttcagcaatggtaaacagtttcagatttcctaaaaacgcatcaacccgttcttcactgccaatatcaaaggagatcatgccgccgaagcccgctccttgcgtttttgcaagctcatgtccgggatgatttgaagaaccagggtaatataacgtttggacagcagggtgattctcaagaaagcttgcgattttccgcgcattttgatcgatcgcttccattctgagtcccaacgttttgattcctctcattaacagccaggaatcttgagggccgagcacgccgcctgtggagttttgcacaaaatgcagctcttctccaagctctttcgaagctgtcacaactaaacctccgacgacatcactgtgtccgccaagatattttgtcgcactgtgcagtacgatatcagcgcctaaagtaagcggctgttgaaaataaggagtattaaaggtattgtctacgataagcagaacacccgctttttttgcgatatcagccatgagcgtcaggtcggtgattttgagcaacgggtttgtcggtgtttcaatataaattgcttttgtattagggcgaatcgctttttcaacttcttccctgctgctcgtatcaacaaatgttgattcaatgccaagacggttaagcacctttgtcatcacgcgatatgttccgccgtacacatcatcagtcaacacgacatgatctccgctgttaaacagcatcataaccgctgtaatggcagccattcctgagctgaacgcatagcctgcttccccgctttccagttctgtcacaagtgcttcgagagcggttcgagtcggattggccgttcttgaatactcgtagcctgtatgctgccctgctttcggctgcttgtacgtgcttacttgataaatcggcacggaaactgcgcctgttttctcatcacctgtgattccgccatgtatcatcaatgtttttttcttcatatcagatgcctccttcgtatatttgtttgctgatatatcgatcgctgctgtcaggaaatactgtgacaatgttagttccagcggatgcttttttcgcttcctccaatgccgcataaagcgctgcacctgaagagcttccgatcagcaggccttctttttctgccgcttctttcacaagtctaaacgcattctcatctgttacggtgtagatctcgtcaaaatggctcttatccatataatcggggataaactccatgccgatgccctctgttttatgagcgtggggctctcctccgtttaaaatcgagcccaccggttcaacaatcaccgttttgactgctggatttttttcttttaagaaggaagctgtccctgcgaatgtgcctcctgatcctgcccctgcgacaaatgtatgaatattcccgtcaagcgcttcccacatttcaggtccaagcgtcttatagtaagtcgatggatttactcggtttttaaattgcaaaacgcaataagaattttcaatttcagtctccagctgaatggctttttgaatggctccctgcattccgtcttgacgcggtgtatgaatgattgatgcgccaagcgcttgcataatttgctgtttctctctgctgaaatgttcagggacacagaaaatcgctttcagcccatattttctggcacttaacgcaaggccgatccctgtattgcctgccgtagcttctataatcactccgccgggtttcactttgcctgaatcgagcgcgtcacgaatcagcatatctcccagtctgtctttgatgcttccccctggattcatcatttcaagcttggcatacaccgcgactccttctggaacatcaaagttcttcaagcggagaagcggtgtattcccaatcagctcggtaatgtccgtaatcactgtcatatatgtcctcctccttaatagaggttgtttttagagaaaaacggaggagaacgttctccccgttttaatgaattcgtttgatcacctttaacacaagctctgttgaatgaacagccgcctgctctaaaaattggtcaaatgaaacatgtgattctttgcctgcgatatctgataacgctctgatgacgacaaacggcgttttaaattgatggcatacttgagccactgccgcagcctccatttcaaccgcgtacagatcagaaaatctcgcacgcacctcttcaacccgcttcggatcgttcatgaaagaatcgcctgttgcaatcgttccttttgcaacctgaatgccgtcgagttcagataccgcttcttcagtgatgctgatcagcttttcatccgccgcataagcagccggaagacccggcacttggccgtattcatagtcaaaagccgttacgtctacatcatggtggcgaacgtcagtggaaatgacgacatcccctacattcaatgtatgatgaaatccgccggctgagcctgtgttaatgacataatcaggcttgtaacggtcaagcagaagcgtcgtgctgatagcagcatttacttttccaattcctgattttaaaagaatcacttcagttccttcatattcgcctgttgtaaattcacagtgtgcgatcgtttctgtttttgcattttcaagtttgtttcttaagatggtaacttcctcttccattgctccgatgactgctagtctcatctattcacattcccttcactttaccgtttgatcgcctccattatccacacgaagtcgttttgctgagtgaatcggactgcaaaaccttcagctgtaaacatttctttcaacgcatccaatgtaggataatgctctgtctctaaatcatttgcaagctgataaaagccttgagaacgggctttatcgatagcctgttgatacgcttgcgcattttcaaagacggtatcggcaaacactattttatcatgcaagtgaaggtatttgccatattgctttatggcagcccgcttttcttcgtcagtcaaatgatgaaaagcatatgaactgacaatcgtatcagcctgaaatggcggctcagggaatgtcaggaagtctccatcaacgatttccgtcctgcctgagagcttgtcagaagccagtttacgcattgctggagaaggttcgattccaaatacagttttgcctgcatcgagcagcttagctgtcaaattcccggtccccgggccaaattctaacacatgcgttccagattttctgacgatggcatcaaggatatgatcgtagcctctgaacgcttctttatactgaatatctaaaccttgtactgtttgatcataagttgctgcccaatcttcaaagagagggataaattcacggcccatatttgtcacactccatatttaataattcctataagtatactatggattaatgatggaacagttcctataataccacatattctgaaaagcaggtactaaaacactttgtgtattttatgccatctcatattgcgcattgaccgcaaaaaagcttatacttcatatgacttgtgaaagctggagggtcaagacatgaattttcaattagatctgattaaagacaaagtggaattttttgaagcggcttcattgcaggagcttgaaaagaaaatcaatacacaaattgaaaacaataaagccatcatgctccgggtgaaatctgtttcacaccaaactcttgtggcagaaggaagaatattgtacagcgcggtggttcatttctcagctgaagcctaaaacaaaagcagccggttttaacccggctgcttttgtttattttagcttttctacttttgtcggcttccagcctttttcatcgacccatgtaatcgtgacttgatatttattcccagtcgccttgtccaaaatcttgcctttggcatcctgagggctgccgttatttccaagccagagcaccgtcatgttatctgttgagacaccagttgcgtacgaaatggctttcagcatctcagcccagtcttgtgagcttgaatcataagtagcggcatgctcgccagtctgctcagttccgactgctttccagtcaggattttcatacgttttttccacatcgctcgatgagccgccttctgttacttttgcatctttaagcccgtcaccggctgaatctgagcttgaatctgaatcagagtcatcttttttagaagaagaatcatcttttttggaatcagagtcagaagacttctcagaatccttttcgctgtcagatgtatctttcttgctgtcttttatatcctcatccgatttcttttccgtctttcctgaagccggagattcctgtttttgcgccgtttcagaatccttgctgacatctttgctagaaggactgttaatgaagagattcgctgctactacgacaattagtatggatacgattgcgattaaaatgttaagcactaaattggcttttctgcgtttatcacgattttcataacgagattgattattgctcaataattctgcactcctttatccctcttggctcagcatatattttaacatgtgctgagaagttgttctatttctgattgatttcaatttcgtgtacttttttaacaatatcataaaacaccgaatttgtcagagccttatctcccggtgtatccatgtgtaaaacaactagagcgtatttcggcttatccgcgggaaaatatccggcaaaccatttttcgtagagcgtttccttctcttttgaaagcttgcctgtctgggctgtgcccgacttccctgctacagtatacggaagatcttgaaaccttctgcccgttccggaaggagattctactacccgccgcagtattttttgaagctgctgtgacgtatatttgtctatcgtttcccctttgagcttctgatctttaaacgtaacgagcgttgtgccgttcttatactcaatttgttcggcaattttcacctgccgtttttctccgccgcgggcgattgtcgccatcatattggctacctccagcggcgttacctttacatttttctgcccgattgctgtttgcgcaatggcttttttgactgatttgtctttttcatccccccaaatcacgccgcttttttcgttatacagctggcggaaatcggtttcgtggtacagttttccctcccagcctgcccgatcagtgagagccagcttctcggacatatcttcaataaccgagctgtcttttttcattaattgttctgcaagactcgtaaatgtgtaattacagctttgggcaaaactttcatcaaaagacaaggtgcctttgtcgtcccccggttccccgtacaggtttaaattgcaattaaaggtttgactaggcttcaccatattattttcgattgcagctgcggcaatgactgttttaaaaactgatccgggatagattggcgtcagcatataattttgaagtgtgttttgccgggacacgtctgcatctggtttgcttacaattcccagaacactgctattttcgatgtccagcagcacagctcctccctttttcagcccctgttcatccaatacctcctccatcgctttttgaatgctttgatcgatcgttgttttgatctggagcggataaaatgtattggcttcagctgtatatttgacgtccatgccaaacaaagggtttccttttccgtccacatgatataaaagctttgtgtcttgttccggaagcaaaaactcgtcaaatgtccgttctaaaccggttgttccgatttctgttgtaatcggaaggctctccttgtcaggatatttcttgcgaagcagcgccggatcttggttcgtgctccctatcgtatgtgaagcaaggctgggcttgtcttcattctccatatatacgccgtaaatgccgggatatttcaaagaattgatttttgtgatagattgttttgaaagtgttttgattttcttttgctgcaaaatgaccggtttttttgcctgacctagtgtctggcgcaaatcatcttcagacatgccgaggatgtccgcaacttttttgatcggccaatcctgcgtcagcagaaaagggaacaaaacaaccgcaggctcgctttgtcctgtcagcgcccgcccgtttcgatctaaaaaagagcctcttccatctgaaatgagcacttcctccgtccgctgtttcacactttcttgaatcaaattaattttctttttagaaaatgattctgtgaaaaacagctggatttctgcaagtctcagcagaagcagaaaaaatacaatcaaaaaagcgatgactgccagcttcattcgtttcgatatcttcataaaaaaacacctcacccacattgtggacgaggtgtttcgctgctaaacagatattatgaaattttcacaattttcacgagcatttctccgcccggtgtttgtactgtgacttcttcatctacttttttgcccaagaggctttttgcgatcggtgaatcgtttgagattttcccttcaaacgggtcagcttccgcgcttccgacgatcgtatatgattcttcatcaccgtcaggcagttcgacgaaagtgacggttttacccaaaccgacaacgttagagccgccgtcatcttcaatgattttcgcattgcgaatcatattttcaagagtcgtcacgcggccctctacaaatgcctgctcttctttcgctgaatcgtattcagagttctcggaaaggtctccgaagcttctcgcaattttgattcgctctactacttcttttcgtttaaccgttttcaaatattctaattcttgttcaagtttttgttttccttctgcagtcataggaaaaactttctcttgtgccatgtcccttcactccttctggttgtccctcaacatcttcgattatgtatgagagcataaactaaaaaatacaagaatgagaacacagggcagtcctcgttcttctctcccatataggtactgtttatcttaaactgaatcgtgtcgttctgcaaatatttcgcgtttataaacagggaaagaagggaattcgcacattcccttcctgcctatacataatatggtcagagttatttatgtctatgctatggtattacaaaatcgcgttttgttcaagaatggtttgaatttttgtgaccatcagatcaattgcgacgtgattctgaccgccttccgggataataatatcagcgtatcgtttcgtcggctcgacgaattggttatgcatcggacggaccactgacacatattgttcaatgacagaatcaatagagcgtccgcgctcattaatatctctcataatccgtctgatgatacgcaagtcagcgtccgtatcaacataaagcttgatatccatcagatcacgaagccttttgtcttcaagaacaagaatgccttcaaggataataacatcctttggctctacgtgaaccgtttcttctgaacgtgtgtgaagcttatagtcataaatcggcttttcaatcgggcggtaattcaatagatcttgaatatgctcgattaaatagtcattatcaaacgcaagcggatgatcatagtttgtgttcagcctttcttcaaacggaagatggctttggtctttataataaaggtcctgctggatcattaaaattgagtgtcctttaaactgttcataaatggaccgtgtgacactcgtttttcctgaaccggaacctcctgcgattccaatgactactggattcttacccatgggctgttacttcccctttctcatcatgttgctcggataaatctttttgtctagtttgaatttgacaatttgcaggggatggcgggcagcatctagctcatttccgtcttcgtcccaaatggtttcaatcgtatgtgtaaagttttcgatttctggaccgaaaaattccacttcgtcgccttttttgaagaaattgcgctgctgaagcgtgaccatttgtgtatcttcatcataattcagcactaagccgacaaaatcatatgtcgttttcttggcgtgttcgccgaacatttgctcttcatagcctggcgttccttcaaagaaagctgtcgcagtgtccctgttggcgcacttatcaagctcttcaagccattctttttgaatcacaaagttttctggatcagcgcaataagcatcgattactttgcggtatacgctgacaacagttgctacatagtgaatggatttcatgcggccttcaatctttaagctgtcgatccccatttcaatcatttttggaatggattcaatcagcttcaaatctttcgggctcatcgcaaatggtgcatcttcttcaccatacaaagcaacggcgttggcaccgtctgtttggtagagatcataatcccagcggcatgactggcagcagcctccgcggttggaatcccgcgctgtcatgtgattgctcagcacgcagcggccggaatatgcaatacacattgcgccatgaatgaaggattcgatttcgatatctaccttttctttcatttctctgatttcaagagcgctagtttcacgtgccagcacgacgcggtcgagaccttcttccttccagaactggacagccttccagtttgaaagagactgctgtgtgctcaagtgaacctcaacattcggcgccactctgcggcatgtttcaataataagcggatctgccacaataataccggcaacgttggcgtctccaagcgcttttaaatagtcttcaagcccgtccatgttttcattatgagcgaaaatattcgttgttacgtagatcttcgcgccatatttctttgcgaattcaacgccttctgcaatttcttcgatcgtaaagttatcggcattcgagcgaagcccgtattcctgtcccccgataaagaccgcgtccgctccgtaatgaacagcgattttcagcttttcaagattacccgcaggtgcgagaagctccggctttttcgtaatcacacgctttccattaacgattgtggatattttatcatttacggcagtcatagcttaacctccttttgattaataaaccgtttccttgaagaagaatccggtatcaatttttctgtttactggctggatgctttcaatgcgttcgatccagtcttcttttttcgcttcgtattcgtcacggttttccacgcacaaatcaattgcttctctgtacattttggtgacttctattaggtattcaggcattttcaaaacaccatcgattttgaaagaatcaattccggcatctatcaattcctcgagctcatcaatgatgcacacatcgttcgggctcatgatgtgagtgccgttttcatcttcgaaaatcggatatttattatcgcgttctttatcgtgtaaaaacatgcctgattcttttttctttctttcaatgtccatgactttgccctgatattcaaaatagtttccaatcaaagaacgcttcgattggaacatgcacgtcattccatgcacctggatttcaatttcgacttcagcattttctttaatctcaacaatgctgtccatgtttaattctctggcaagcacagaacgcgccgcacccttgcgtccccagtagttgcatgtataatagttggtgcctgtcgtttctgtgctccaatgaagcttcagatcaggcgcagattcacgggcagccatcagcacggcaggatcgccgaataccgctgcatcgacaccggcttctgctaagaaagccagatattcgccaagctcacccactttatcattatggaaaattgcatttacagcaacgtatacttttgccccttctttgtgagcaatctctacggcttttgttacatcttcacgagaaaattctccggctaatctcaagccgtatctctgttccccaactaaaaacgcagttgccccagcctgtatgagcggcaaaatgtccgctgtactcgtcggcgtcactaagagctctggttttttcatgacgttcacctcttctttttactaatcgcaagtccgtccccgacaggaataatcgcagtttgataatccggatgattcatcagccaatgattatattcatcaattttggctacaagcctgcgccttctcttcggttctattttgctgtaatcctctgccaccagacctttaaacagcacgttgtctgttataatcaccccgtccggtgaaagcatcggttcatataaatgaaaaaagttttgatactgaccttttgcagcgtcaataaaaatgacatcgtaaggcgcggttacatgaacggcgtcggctaattcaagcgcatctccgtaaaaaacatgaatccggtcatcaagctgaaattccttgatattgtttaccgcttcttcatgccgtttctcattgcgttcaattgtatatatttcagcagacggcagttccagagccattcgaatggctgaataaccaatggccgttccgatttctagtatttttttcggctgtttcacagacaaaatttgaagcagcacctccatgcccgctttttccataatcgggacatgatgttcttctgcatatgcttcaagtctcttcacgttatccggccgaggctttaataatgcttctatatagtcatttatttgttcataccggtcagtcactacaaacagcctcccgttctaaaaaggagtgccccagtcttatgcgcaggacactctctgaatacatcatgatacatcggtaaacaacccgatatattttatcataaaaccttgcggaaagcgaacaaaaggagagctttttgctctccttttatttctcattttttgaggaaatgtatttttcttttgctttattatgctcttttagcgtttttgtaaatacgacctcaccatttgatttggccaagaaatacagatagtccgttttatccggatgcagcgctgcttcccatgatgacatgccggcattggcaatcggccctggcgtcagccctgtgtttttatacgtattgtatggtgaatcgatttccagatccttataaagaacccgatctttatgcttgcctgccgcgtacaggacggtcggatctgtttggagcggcattttctttttcaggcggttataaaagacgctcgcaattttatggcggtcggctttttcagtcgcttcttcttctatcaaagaagccattgtcagcagcttatgcacagaaactttgtttttcttcatttctgatttatatgtttccacataagaatttgtctgcttaatcattgccttgataatgtcttcaagtgatgtgtccggatcgttaaaagggtatgtagccgggaataggtacccttcaagcgggtgcttaatgtttttattgaaaacatcatttgtcacagtgtccgggaattctttcttcagctgattgataaatgtttcatcgtccagcttcgctatgacttgttttttagagtattttgtttcatcagcaatagcagccgcgatttgggtcagctgtgctccctcagtcactgtgatttgaaaagcgtaacctgtagccccgcttgtcagcttctgaataatggcatctaaatccatacctttattcagatggtagaatccggcctgaaacccggaagcacctttatatttcacatagtactgaaacgccttctcgctttttatgacatcatttttctttaatatcgatgcgatggctgaaacagacgaaccgctcggaatgttaatattaactgtcgttttactgtctttttcaacaggttcaagcaatgatttcccatataaaaatgccccgccaatgatgagaaacagcacaacaatggaagacagtatgattctttttttattaaaaaacgattttttttgctgattgatatacattaggtctcctcccatcagctcttatactacatgattcattgtatttcggcaatttattacaaaaagaggcctgcataaagcagaaaaaagccggagcagtatagctccggctttggtttggcgcgatgttttactcttcgtcttcgtccgctaagaatgtgtttagtgtttcttcgatcatatcccattcttcgtcagtttcaatcgggaatagctcaccgttttcaccgtcttcgtttggcgtgaagctggaagcaagaatttctacttcttcgtcatcttttgattcgattggatagtacaagacataagatttgccaaactcttcattttcaaatgtaaacagcacttcacaaagctgttcatttccttgatcgtcaacaattgtaatatttttttcgccgtgttccattttcttcacctctggctttaatttaagctgtcaagatatccttgtaaaatcataacagccgccattttatcaatgactttttttcgtttttgcctgctgacgtcagctgcaatcagcattttttcagccgccattgtggtaagacgctcgtcccacagcacaacaggaacattgtacgttgtttcaagcactttcgcaaatgtttggctggcttcgcctctcgggccgactgttccgttcatgttcttaggaaagccgagcacgattttatctatagtatagtcctttatcagttcagataaacgggataaaccataatcgccttctgcttcatttatctttatggtctcaatgccttgagcagtccagcccatttcatcgctcagagctacaccgagtgttttggttcctaaatcgagtcctaatattctcattctttatttacgcctctttatgctgttctaaataagactttaccaattcctcgattaattcgtctctttcaagtttgcgaattaaattgcgagcgtcacgatgcctaggaatataagcgggatcacctgacagcaagtatccgacaatctggttgattggattgtagcccttttcctgaagcgcgtcatacactgtaatcagcacctcatttacgttagtctcagcagaatcatcggagaaattaaatttcatcgttttatcaaacgagctcaccgttttgcacctctttcccaaattcgcaggcaaagttcagcctggggtcctaatcttaccatcattctacactacatgggcgaattataaaacggatttcacccaatcttctacagaagccaaagcttcttctaatttttccggctgtttaccgcctgcctgcgccatgtccggacggcctccgccgcctccgccgcaaacttccgcagcttgtttaaccagcttgccggcgtgaagtcctttctcaatgaggtcctttgtgactccggcagagatattaactttatcgttttgtaccgcaccaagcacgatcaccgcagagccaagctttgctttgagttcatcgaccatagtgcggagatgattcatgtcttttgcatttacttttgccgcaagcacgtttacgccgtcaacttcttttactttcgacaggattgctcctgcttccacgttgcctagttttgcaagaagagattcattttctctttgtgcatccttcagttcagcctgcagagccgcgacccgtttcggcacttctttgatatttgttttcagctcgtcagcggtctgcttcaatacagaaatctggctgttcatttcgacgtaagcgccttgtcccgttacagcttcaatccgtcttgtgcctgctccgattccggattcagaaacgattttaaacaagccgatttctgctgtatttctgacgtggcagccgccgcacagctctaagctgtaatctccaacttgaacgacacggacaatatcgccatatttttcgccgaacagtgccatcgcacccatttcttttgcttcagcgatcggtttcaaatcaatgctgaccgggatgctcgcccagatcttttcgtttacgattctttcaatttgttcgagctcttcttttgtcacttggccaaagtgcgagaagtcaaaacgaaggcggttttccgttacaagagagcccgcctgattgacatgagttccaagaacatcttttagagcctgatgcaataaatgcgttgccgtgtggtttttaatgacgccgcttctcatatggtcttcaacttcagccgtaacatgcaggcctttttgaacagtaccgctctccacaacaccttcatgcacatgctggccgttcggcgctttttgaacatctttaattcttacaactgcctgctcgcttcggagatagcctttgtcgccgatttggccgccgctttctgcatagaacggtgtttcatcaagaatgatttgaacgctttctccttcatgagcctcttcgattaattggccgtcctgaagaagcacaatgatattggcatcagctttggtttgagagtagccgacaaatgtgctttcaactgtcacgtcgcgcagtgcgccgccctgcacctgcatgctgccgacatcctggcgggcgtttcttgcccgttcacgctgctggttcatttcctcctcaaagccctcatggtcaaccgtcatgttctcgtcttctgcgtattcttcagtcaattcaaccgggaatccatacgtatcatacagtttaaacacatcagcacctgagataacgctgctgcccttgtctttttcttttttgatcatttctgacaggatcgcaagcccttcattaagggtctcatggaagcgttcttcctcggttttaatgacttttgcgatgaaatccgctttctctttcacttcaggatagaaatcagccatgatttctgcgacaaccggcactaaatcaaacatgaacggacgatggatgttgatcgttttggcataacgcacggcacggcgtaataagcgtcttaatacatagccgcggccttcatttgacggcagcgcaccgtcactgacagcaaaggcaaccgttctgatatggtcagcaatcactttaaacgcagtgtctttcacattgtctttgccatatgtttcaccagaaatcgattctgttgctttaatgatcggaacaaacaaatcggtgtcaaagtttgtcggaacattctggatgacagacaccattctttcaagacccatgcctgtatcaatatttttctttggaagcggtgtgtacgtgccgtcagggttatggttgaactctgagaacacaaggttccatacttccaggtaacggtcgttttccccgcctgggtaaagctccggatcttctggatcattaccgtatgcttcaccgcggtcgtaaaagatttccgtattcggtccgctcggcccttcaccgatatcccagaagttcccttccagacggataattctttcttcaggaataccgatttttttcgcccaaaactcatatgcctcttcatcttcaggatgaaccgtaacagagagaagctctttgtcgaagccaatccacttgtcgctcgttaaaaactcccaagcccatgtaatggcttcttctttgaaataatcgccgatggaaaagtttccgagcatttcaaagaaagtgtgatggcgcgcagttttacctacattttctatatcgtttgttctgatcgctttttgagcgtttacgattcttggattttccggcacgacacggccgtcaaaatattttttcagcgtcgcaacaccgctgttgatccaaagcagtgaaggatcctcatgaggcactaatgacgcgcttggctctaccgcatgtcctttttctttaaagaaatccaaaaacatttgacgcacttccgcagaagttaagtgtttcattgtatttcctcctctataaaaatcgaaattctcttcagtgacagcaaaaaagccctccccctatgcaaaccaacgtttacacagggacgagagctgtctcgcggtaccaccctgattacgggcattcatgcgcccgtcacctttaaccctgtaacgcaggataagcggcagtgattaactgcactcaggattagcttcctccgatcttctgataaagctcctttcagcttatggagcttctctctttaacagggcttcggcgtactcagatccgtcactcgagattcgtatgtattctacgagaaattatagacaagcggcacgccgatgtcaatgctccgtcctcatccgcaaaaaatggatcatcattacttttaaaacagccgtcgcaggaacagccagaatcatcccgacgatacccgcaagctcccctccggcaaggagtgcaagcatgataacgaccggatgcattttaaggcttctgccgacaatgaacggactgaggatatttccttccataaactgcagaataaacaccgtaatcaccacaacaagaaccgccttgactgagatcgtcatcgcaattaacaacgcaggaacagctccgatgaaagggccaaaatacgggatgacattcgttaccccagagataaggccaagtatcagcggatacggaagcccaaatacccagaacgaaatgcctgcaatcacgccaagaatcaagcagaccaaaagctggccgcggatataatcgccaagcgaatcatccacatcccgcaaaaaggcgctgccccgctttctccacgacttcggagtcaagtaccatactgtctttttcattaactcaatgtccttcaccatataaaacacgagaaaagggattgttgcagcaattaagaagtaatcaagcacattgcggatcccgctgatcgcaccctcgatcgttcccgcaaaaaacgcctccgtctggcggatcattttatctatacggtgatgcataccatcaggccagtcatccgtatggttatgcacatgaagaagaagcccgttatacgtttcggcaaacatgggtatattttctgacaaatccgtcagctgcacgattaaaacaggcacccctttatacaacgcccagccaatcccgccaaaaaaaagaacataaatgaccaagatgctcaaagtcctaggcaatcctttgccatgcagccattctgtgaccggaagcaataaataagatataaaaatagaaatgatcaagggaataaagatcgtttttatgacgagccaaaagggtgaccataacatatcaagcataaaaaagacatagactgttaacagaaccagcaaacaaatagccacccacaacaaaagctgcaccggtttttggagcatctgctttcacctcacctatatcttttgaggtttacaaggaattattctttatgtttctttagtcagtcagaagtcatggacattttttcacttttaattttcagaaaagtttgatcatttactttttggtcaaattttctgataggaggattgcgatgatcacatttcaaaatgtaaacaagcattacggagattttcacgtgttaaaacaaattaatcttcaaatcgaaaaaggtgaagtcgttgttatcatcggcccatccggttccggtaaaagcacattgctcagatgcatcaacagacttgagtcgatcaatgagggagtgcttacagtaaacggcaccgccattaacgacagaaaaactgatatcaatcaagtgcggcaaaatatcgggatggtgtttcagcactttcatttatatccgcataaaacagtgctgcagaacatcatgctggctccggtaaaagtgcttagacaatcacctgaacaagcaaaggaaacggcgcggtactatcttgaaaaagtcggcatcccagacaaggctgacgcctatccttcccagctttccggcgggcagcagcagcgtgttgccatcgcaagaggactggcgatgaagccggaggtcatgctgtttgacgagccgacatcagcacttgatcctgaaatgatcggtgaggtgctagatgtcatgaaaacactcgccaaagaaggcatgacaatggttgtcgtgacacacgaaatggggtttgccaaagaagttgccgaccggattgtcttcattgacgaaggaaaaattttagaagaagcagtgccggctgaattttacgcgaacccgaaggaagaacgggcccgcttattcttaagccgtattttaaatcattaaaacagaaatgggggagcttgtatgaaaaagattttttctttagcattgatttctttattcgctgtcatcttgcttgccgcttgcggcagcaagggatcaaacggagaagcctcaaaggagagcaaaaaagatacgctagccgccattaaagacaatgacaaaattgtcttcggcgtaaaaacggacactcgactgttcggtcttaaaaatccaagctcaggtgagattgagggttttgatattgatattgctaaacaaatcgctaaagacattttaggtgatgagaaaaaagctcaatttaaagaggtcacctcaaaaacaaggattcctatgctgcaaaacggggatatcgacgccattgtcgccacaatgacgatcactgaagaacgaaaaaaggaagttgacttttctgatgtctatttcgaggccgggcaatcgcttctcgtgaaaaaaggcagcaaaatcaagagtgtcgagaatcttggcaaaggctcaaaagttcttgcagtaaaaggctccacctcctctcaaaacattcgtgaaaaggcgcctgaagcatctgttttagaatttgaaaactacgcagaagcctttacagcccttaaatcggggcaaggcgatgccctcaccacagataatgcaattttatatggaatggctgatgaaaataaaaattatcaattaacaggaaagccttttacagatgagccttacgggatcgccgtgaaaaaagggcaatctgctctcgcgaaagaaatcaacgcttcacttaaaaagatgaagtcggatggcagatacgatgaaatttataaaaaatggatcaaagaagacccagctgaataacaaccatcccgggatgagcaggcgatgctcatcccaatttgataaggagtgaataggcagatgaatgtgtcaattcttttcgataacttcagcatgtatatggacggtttttaccataccttgctcgcaagtgttatcgcgctggccggcagttttgtcctcggcgttgctgtagcggttatgagaataacagtctttaagccgctgcaatggctcgggaccgcatatgtagaattcatccgcaacatccctcttcttttaattacctttgttttctatttcggacttccaaacgcaggcctgaggcttgacggttttcaagcgggaacggttgctctcaccatttatacctctgcgtttatcgctgaagccatcagagcaggcatccagtctgtttcaaaagggcagatggaagcggcacgctcgtcaggctttacctacagccaagccatgctccatatcattttgccgcaggcaatcaaaatcgtcattccgcctttaggcaatcaatttttaaacttagtcaaaaactcttcgattcttggggttgtggccggattggatcttatgtaccaagccgatttagtttcgtcgagcacactcgttgtatttgatgtttatatttttgtggcgcttttttacttagtgctgacgattccgcttagcatcggtgttaactatctggaaaaacggctggaaaaaagctattgataaggagtgagttacattggatttcatcggtgcttattcacaggagcatttagcgtttttatgggatggctttctcgtcaccttgtacgttgctttcatctccatcattctgagctttttcttcggtttaatcgcaggcaccctgcgttatgcgaaagttcccgttctttctcaattgattgcagttctcgttgaaacgatcagaaacctccccttgctgttaattattttctttacgttttttgcccttccggaaattgggattaagcttgaaattacagctgctgcaattacagcactaacgatttttgaatccgctatgctatctgaaattatccgaagcggactgaaatcaattgacaaaggacaaattgaagcggcgcgctcctccgggctgagctatacacagaccctgttctttatcgttatgccgcaagcgcttcgccgcatggttccgcccatcgtaagccagtttatttctttattaaaagatacatcgctcgctgttgtgatcgccctgcctgaactgattcacaacgcgcaaattattaacggccaaagcgctgacggcagttattttttcccgatctttttacttgcggcccttatgtatttcgcagtcaactacagcctttcactcgcagcaagacgcctcgaggtccggcaaacatagaaaaggatactctttggagagtatcctttttgcattaaaacattttcgtaattcttcttctcatccgcttcatgcttcgattattcagcatgtcagattgagtcgccattcggtacacgagagctccggctcccattgccaaaagagaagtcatcgtccgattcatcctgcgcatctcctttcatgattaaaaattgatgctgcgttcatcctcagaaaacaaatcatccaagctgcttaacgttccgtcttcttccacctgatgagttgcaatcttccctttcgccactgtcagttcaataaaacagccccagcaataatattggttcacgccgattttgccgatatccttacttttgcaattcgggcatataagcatacctcacacctctatccgttcagaacgatctcgtctttccgcacctcgacaagcgaatccgctctttggatctggcgcttgcttcccgccaggtcagaaaagaaaccgtccgagagttcatatgctacgattatgcccctgtccaaacaaaagtatacatcttccagcatccccaatatatccccctcttgcgatttcacaagcttcatcttcatctgctcgtatgtgaagcatgatttcggaagaggcaaaagctgttctgaactgaccgaagccaatatgcggtcatcaaaaatggaagagatatcacacgcccgtaatagcgcatgatgatgatgcaaaaagcgtttttgtgcaagaataaacccaagacaatctcctttcagagaaaaacaaatatcggaaattgtcccgagataactagaagttcgttctgagtatactgggaatccttctacttcatggcatgttctcaaagtgtgatcaaccaccttttgttgaacaggcttaggttttgctttgcgccttagactcatacgatgaaatcaattccactgcaaatgaaaaaaaactcccgcttgcacgggagcattttattgctgttcttctttcataaaatcgaatggtgtaatgccttccatgccaatgttggcgtcgtgtacgctgaacgggagctctttttgcaaagcttcaagctcggcatccatttcctcaacctgtacggacagcctgtttttcaaggaggtctgtctgacagttgcatcattatttttcacgccccactccagcgcctcctcttccccgcataaaatgagaaatttcttcgctcttgtaatcgcggtataaagaaggtttcttctgagcattctataatagcctttcacaacaggcaaaaccacaatcggaaattcacttccctgcgatttatgaatagaacagcaatacgcatgggtaaattgattaaaatcttttttcgtaaatgtcatttcattgccgtcaaaagaaacgacggccatgtcttctttttctgtattttcctttgcataaaatatcgacgtgatttcgccaatatctccgttgaacacattgttttccggctgattgacaagctgcaaaattttatctccggttctgtagacaacatccccgaacttcaattctctccgtttttctttaggaggatttaaaatgtcctgcagcatcacattcaattcattaatgccggcttttcctctgtacatcggagcgaggacctgaatgtcctttgctgtatagccttttttcaatgcattggcgacaaccttctcaactacttctttgatttgcgacccgccgcagcgaataaaggaacggtcctttgtcggggcagtcaaattgttcggcagcaatccatttttcatctggtgggcaagctcgacgattgatgacccttctgcctggcgatagatgtctgtcagtctcacagtcggaatcacctgggatgccagcaggtctctgagcacttgtcccggaccgacggaaggcagctggtcttcgtctccgacaatgatgatttgtatatgatcagggatcgccttgaacaaatgattcgccagccatatatcaagcatactggcttcatcgataattaacagcttcccttcgatcggctgatcctctgtatgagtaaagccttcagcgccgttccagccaagcagcctgtgtatcgtaactgcagggagtcccgttgattcactcatccgttttgctgctctccctgtcggagcggccaaaacaatcggaaaagcttcatcctttttataagctgacgggtctagtgacacaccgtgaagctctccgtagagctcgacaatccctctgattaccgtcgtttttcctgttcccgggccgcctgttaaaagaagcatcggcgaggaaagggctttttgaatcgcttccttctggctgggggcatactgaacgtccatccgttcttccagttctcccaacgcgagcaaaaactctgattcgggaaactggttctcatattcggtttggctagcgatatgtttcacacgctttgcaacgttttgttctgcgtaaaacagcgaaggaaaataacagcggccatcttctatgacaatgtctttattttctccaagggcaataattgcgttagcggcatccatttctgtaatgcgctgcccttcccttgctgactggtttaacagtgattgagtgtcgatgatcagctgttccgtttctatgtacgtgtgcccctctgacagacaagtcgtttcaagcgtgtacaaaatagcagcttttacccgctcaggatgattacccgaaagacccattctgctgcccagctcatccgcttttccaaacccgatgccttctacatccttcacaagctgataaggattttcctgaatcttttcaagcgtctcggattcataggcttgatagattttcatagacagctgcgggccaaagccaaactgattcaaggaaatcatgatttgctccagtccctgatgccgctgcaatgcgccagccagcgtgtctgctttcttttttgagagtctgggaacatcataaagcactgaagcatcagccaatattttattaatggcgctgtcgcccagctttttcacaatttcttcagctgtttttttgccgatcccctcgaataaatcactcgataaatattgaatgatgccttccttagtcgttggaatctcctttttgaaatgctccgcctgaaattggagcccgaattttggatgggttacgatctttccgtaaaacgtgtaggtctcttcttcttgaagcgcagggaagtagcccgtcacggatacggctttatcttcaatggcttcggaggtctctgtgactttcactttcagaaccgtatataaattggtgtcattatgatagatgactgtgttgactgtcccttttaaatagggctcttcctccagtttaagctgatccggatgctgctgcacgagctgtccctcctcctgtgcctgttatgatggatcaatcagttttttagcatgaagcgcaagcatatgatctggctggatatcgattgccttgtccagcatttccagcgctttttctcggttttctttataagcataagtgacaccggcattataaaatgcatctgcatgccccgggtcttgctctgtcacagctgcgaattggctgagcgcttcgtccagcatgccctcgttggctaagcacatcccgaattgaaaacgcgcttccgtatcgttttcattcagttcgactgctctttgtaaatatggcagtgcaagcttaggctgttcgagcttgacaagtaccgttccgagcatgtaaaacaggtcgccgttttccatccccgcacgtagcgctttttcaaacatgtctttcgcttctttgtacatttcttttacaacatagacatttcctgctccataataagcagtggctgcgctactgtctaattcaagcgctttatcataaaacgcaagcgcacgttccagctcgtttacggatgaaagaaggttggcaaaattgatatacggaatcgcgtcttctttattttcttcaatcgcttttgtaaatgcctctgccgctttctcgtaatcgccttcctgcatcgcctctataccgagttgattataatccaccgatcatcttcctttcattaaaaaaccccaactcagtgttgaggtttttcatcttttatacgtaccacaattttgttccgtctttgtacacatcatcaattgtcccgccgccaaggcattcttcgccgtcatagaagacaacggcttgtcccggcgttacagcgcggacttgttcatcaaagatgacttccgcttcaccttcgccagtcatgcgcactgttactttatgatcctcttggcggtaacggaatttagccgtgcaggaaatctcttcgcccttcatgatatccgaacgtacccagctgatatttgttgctgtgattttgtcggaatataaaagcgggttatggaacccttgatctacgtagaggatgttcttttcaagatctttgcctaccgcaaaccacggctcgccgcttccgccgatgccaaggccgtgacgctgtccgatcgtatagtacatcaacccgtcgtggcggccttttacttcgccgtccatcgtcatcatatcgcccggctgtgcagggagatattggctgagaaacgttttgaagttgcgttcgccgataaagcagatgcctgtactgtcttttttcgtcgctgttgcaagttctgcttctttggcaatttcacgcacacggcttttttgaagttcgccgatcgggaacatgactttgctcagcgtatcttctgtcagctgattcaggaagtacgtttgatccttgttttcatcaatgccgcgcagcattctgacttttccgccgcttctgtctactcttgcatagtggccagtcgctaaatagtcggcgccaagtgacaatgcatgctccaaaaaggccttgaatttaatttctttgttgcacaatacatccgggtttggtgttctgcctgctttatattcatcaaggaagtattgaaataccttctcataatattgcttttcaaagtttacggcataatacggaattccgatttggttgcagacgcggatcacatcttcataatcctctgtcgccgtgcaaaaaccgttttcgtccgtatcatcccagtttttcataaagattccgattacatcatagccctgttcttttaacagcagggccgccacagatgagtctactccgccggacatgccgacgacgactcttgtatcctccggccgtttttccatttcattcactccaattactacgccgccttattatgtcagccgtttgacaacgtcggccacatgtttggcagcagttttcacttgctcagccgtattgccgaggccgaagctgattcgaatagaggacgtcagccggtcactctcttcgccgaacatagcagtcagaacatgtgacggcaggactgaaccggccgtgcacgctgaaccgctggagacagcgacaccagccatatcaagattaaccagcagcgcttccactgacacaccggggaaataaagattcagaacatgcggcagactatgctctttgtccccgttgacctcgaatgccacacctgcatctctaagcgtgtcggcaaagattgctttaaacgattgatacttctcgtttttttcgtcacgttcttcacttgacagcttgatcgcttctttcagcccgacaatgcctggaacattttccgttccggcacggcgttttctttcttgctctcctccgaataaaaggggtgaaagcttcacatctttactagcatataaaaagcctgtcccttttggcccgttgagcttgtgcccggaaacagacagaaggtcaatatggctgtttttcacatcaattggcagcaacccgaatgcctgaacagcatcggtatgaaaataagctttgtgttcctttaacagctcaccgatttcttcgatcggctgcactgttccgacttcattatttccatacatcactgtcacaaggattgtatcatcacgcagtgcttctttcacctgttttgcactgactcttccattttggtcaacgtccagatacgttatgtcaaatccgtctccctcaagtttttcacatgtgtgaagcacggcgtgatgctcaatttttgttgtgatgatatgtctgccaagatcttttcttgcaagtgcggttcccatgatcgccaagttatcagcttccgttcccccgcttgtaaaaatgatctcctgctctgccgctccgatttctgctgcgatctgcgctcttgcttcatccacccattttcgagattctctgccaaatgaatgaatactggagggattaccgaaactgccggagaagtgcggtatcatttgttccagcacgcgctcatccatcggagacgttgcggcatgatctaaataaatccgttccattatgtttacacctctgatctaaatatagaacatataagcttcttgctctccgtctgtatagctggcaagatcctctaatgttgtactgtctaaaacctcttttacagcatcccggatgcgaatccagagctcacgcttggcaggctcctcatcttccagcacttcaacagggctgatcggcccctcaagcacacggataatatctcccgcagtaatggcatccggctcactgcctaatacatatccgccatatgcgcctctgatgcttttcactaaaccggcatttctgagcggcgataccagctgctccaaataatgctcggacaaattattcgtctgtgcgatgctttttaatgaagtcgggccttcaccgtgcttttttgcaagctcgatcataatggtgagcccgtatcttcccttagttgatattttcaacatgaacacctctgttatttcatgattttccacatttataatggtaatttctatatgtttcgtccgtttattatcttatagaccaactgttattataacataccttcagcgaattttcattgaggcagaaggaaaggggcctttacccttttctaatgtacggttttccgttaccctgtaattaagtaaggagagatgatagatgaagccattggcatatcggatgcgtccgacaaaaatagaggatattatcggccagcagcatctggtggctgaagataaaattattggcagaatggtccaggcaaaacatttgtcatccatgattttgtacgggccgcccggaattggaaaaacatcaatcgcaacagcaatcgccggttcaacaagtattgcttttcgaaagctgaatgctgtcattaacaataaaaaagatatggaaatcgtagctcaggaagccaagatgtccggccaagtgattttgattctggatgaagtccacaggctggataaaggaaaacaggattttctattaccctatttagaaaacggaatgatcattttgatcggagcaacgacggctaacccgtatcatgccattaatccggcgatcagaagccggacccagatttttgagcttgaaccgttaacacctgaactgattaaacaggcactggaacgtgcgctccatgatgagcatcggggccttggcacctattctgtatccattgatgatcaggcgatggagcattttgcccacggatgcggaggagatgtccgctccgctttaaatgcgcttgagcttgccgtgttgtcaacgaaggagtcagcagacggtgaaattcacattacattagaaaccgcggaagaatgcttgcagaaaaaaagcttttctcacgataaagatggtgacgcgcattatgatgtactgtccgcttttcaaaaatcaatccgcggctctgatgccaacgctgctcttcactatttggctagattaattgaagccggtgatctggagagcatcgcaagacgattgcttgttatcgcctatgaggatatcggtttagcaagcccgcaagccggccctagagtgctgaacgctattcagaccgctgagcgagtcgggtttcctgaagcgcgaatcccgctggccaacgcagttattgagctttgcctctcaccgaaatcaaactctgccattctggcaatcgatgaggccctggcagatatcagagccggaaaaattggggatgtcccgaagcatttaaaagacgcgcattataaaggagctcaggaattaggaagaggaatcgactataaatacccgcacaattacgacaacggttgggtcgaacaacaatacctccctgatcctctgaaaaataagcaatactataagccgaaacagactggaaagttcgaatctgccttaaagcaggtgtacgataaattaatgaaaagaaaataaaacaaaaaaacagccttgatcatcaaggctgtttttatgcattatttatccttcacacgtttgatttcaatgtctttcaaaagatccatgacaacatgtccgcccataatcaaacctgcaactgacggcacaaaagcattagaggaaggcggcatttttgctttacgtattttcgcttcgtcattccccacttcttttctgacatcttcccgaataacaatcgggctttcatcagagaaaatcacttgaacgccttttttgataccctccttgcgtaatttcgtacgaacgaccttcgcaattggatcagtgtgcgtttttgagatatcagcgatttggaagcgtgtcggatccgttttatttgcagcacccatgctggagatgagcggaatatcccgttttagacattctttcattaaatgaattttataacaaatggtgtctgacgcatcaatgacatagtcaagaccatagtcaaaaaactgctcatacgtttcctccgtatagaacatttttaacgcgatcacttcacactccgggttaatgtctgcgatccgcgccttcattaaatcaactttcggctgtccgacagttgaaagcagcgcgtgaagctgacgatttacatttgtaatgtcgacatcatctttgtcgacaagcagaatgcggccgacgcctgaccgcgcgagagcttccgccgcgaacgacccgactcccccgactccaagcacagcaactgtgctgtttttcagcgtttcaaggccttcttttccgatagctaattcattgcgtgaaaactggtgtaacaagaacctcactccacattcgtattctggtttcatctataaaatggctgatccatgagcagccgttttttctgcgcacaaaaaataaagtcccaatagtgccgttgcagctttcctttgttttgaacccgctctcagcaggtgggtgccctcttttaaatcttgtaagtcctctttaccgaatgaaaagaggcatgtacgccatttaaaaatgcgggctcccaaatcaaaaaaatgttcggtcaaaactaggtgtacaactaacacatcaggactttatttaacttgtcaaaatcatatcacagacgattttgattttcaagaatcgaactgcaaattcagttcttaacttttttcttgatagaaagatgaagctcgtcaagctgggcgtcgcttacttcgcctggcgcttctgtcatcaggcagcttgcacttgccgttttcgggaatgcaatcgtatctctcaggttcgtacgtccagcgagaagcataacgagacggtctaagccgagtgcgattccgccgtgcggaggagcgccgtattcaaatgcttccagcaggaatccgaactgttcagccgcttcttctggtgagaagccgagaagcgcaaacattttttcctgaatatccttttcgaaaatacggattgaaccgccgccaagctcatagccgtttaagacgaggtcataagcttgcgctttcatgtcttcaggcgctgtttcaatcagctcaaggtcttctcggacaggcattgtgaacggatggtgcgctgcgtaaaaacggccttcttccggatcatgctctaatagcggccagtcgatgacccataagaaattgaacaatttttcgtcaatcagtccgcgttctttcccaagctttaagcgcagggcgccgagtgatgcggccacaacttcgaattgatccgctccgaacagcagcaaatcaccttcagcagcatcaagtgcttcaatcagcttagactgcttttcttcatcaaagaatttagcgatcgggcctttcactccgtctgcctcaaccttcacccaggcaagcccttttgccccgtagtttgcagcaaaagcgccaagagcgtcgatgtcttttctggagtaatcgccggcaccgccttttacattgatggctttgaccacgccgccgtttgctacagctgatgagaacactttaaattccgtatcctttacaatgtcagacacatccgtcaaaagcatgtcaaaacgcgtatccggtttatcagacccgtacttgttcattgcttcgtcatacgtcattcgaggaagaggaagctgaagttcctcaccttttgtttcacgcataacctttgccatcatctcctcagccaatgacataatgtcttcctggctcataaaggacatttcaatatcaatttgcgtaaactcaggctgacggtccgcacgcaagtcttcatcgcggaaacagcgggcaatttgataatatcgttcaatgcctgataccatcagaagctgtttaaatagctgcggagactgcggcagcgcgtagaactcaccttcgtgcacacggctcggcaccaagtagtcacgtgcgccttcaggcgtgcttcctgttaaaatcggcgtttcaatatcaagaaacccattttcatctaaaaagctgcgaacagctttcgtcacgttatggcgcagctgcatcgtctggaacatagccggtctgcgcaaatctaagtaacggtgttttaaacgaacgtcctctgacacttcttcagcttgatcagaaatcgcaaatggaggtgtctttgcagcatttaatacgttcactccatcagcatgtatttcgatcgcgcctgttttcaaattcggattaactgttccctcttcacgcgccaccacttttccttgaatatcaagcacgtattcatttctgatgccttccgcaatagcaagcgcttcttttgacacatcagggttaaaaacgacttgaacaatgcccgtacggtcacgcaagtcaataaaaatcaatccgccgaggtctcgtcttttttggacccagcctttcagcgttacagattcgccaattgctttttcagttatatcaccgcaataatatgttcttccaaacaatgcgtttcactccttatcccttttggtttgccttcatcacatgtataaattcatcaagtgccacttcaatctgttcgcccgtctgtgcatcctttacattgattttgttttgggcaagctcatcttcacccaaaatcgcaataaatctggcctttaagcgatcagctgttttaaactggcctttcattttcttattttcataatcgatttcactggaaatgcctgcttctctcagtttgtacaccaatgaaacagaataatcctttgctttttcgccgagtgtgacgatatagcagtcgattcccttatcaacaggcagctctcttttttcagcatcaattgcggcaagcaagcgttcgatgctcatcgcaaatccgatgcccggtgcttcaggtccgccgatctgttcgacaagcccgtcgtagcgtccgccgccggcaagtgtcgtaatcgcgccaaagccctccgcattgctcataatttcaaatgcggtgtggttgtaataatccagccctctcacaaggttcggatcgatttcatacgaaatgccaagatcatttaagtattgtttcactttttcaaaataagcggctgattcttcatttaaatatgtcaaaatcgaaggtgccgatttcatcagctcatgatcacggtcttttttgcagtccaaaattctaagcgggttcgtgtgcagccgggactggcagtctgaacaaaattcttcgatgcgaggctcgaagtgtttcacgagcgcttctctgtagcttttgcggctatcttgatcgccgagactgtttatgacaagcttaacgttttctaaacctgctttttcataaatactcatcgcaagcgccattacttcagcgtcgattgcagggtctttcgaaccaatcgcttcaattccaaactgataaaactggcggtaacggcccgtctgaggacgttcataacggaacatcggcccgacataataaagctttgtcggctgtacaggatttgcgaacagcttgttttcattaaaagcgcgaaccgcagcagctgttccctccggacgaagcgtcaggcttctgcctttgcggtcctcgaaggtatacatttctttttgtacgatatccgttgattctccgacgcctctggcaaacagttctgtatgctcaaaaatcggtgtgcggatttctttatattgataagtgcggcaagtgtctctcataatttgttcaacaaactgccagcgatctgattctccaggcagaatatcctgtgttcctctcggaatgttatatcccataggtagacctccttatgtattccttataaaatatccaatgatcgttaatgatgaaaatgaaaaaaactcccgcccctactatacatgatagtagggacgagagttatacccgtggtgccaccctagttggaatacgttcatattcccgctcgatcctttaacgcaggttcacgttcactgcctaatggcgttattcacgcgttcagcaggaaacctccggagtgttgtttcgagaaagacgcaatgggatccgctttcagcctggggcgggttcctctctaatcatgcaatctgacctactcttctccattattggttcaaatctttcatcatttgctatgtactcaatttctattataataatgggattggggttctctgtcaagctttattccggttgtttttcctcagcgctgcttctttggacataagaccaaattcagatgctgtttccgtaagataaccagtcgtatcgggatctgcgtgatcgctgtaatgcagattcgcttcaccgtcgtgaaatgcacgtcccatttttggatgatatttcatgatttgcacacctttttgattgtatttacgcttagtataaacaaatcattttatttttatttaaaaatcagaaaggactttacgatattaaacaagaatgcttttttaatgatcatcagaaaggaggacacaatgaacaagaaatactttgtccttattgtatgtattattttcacctcagcgctattcccgaccttttcatccgttacagctgctcaaggagaagcggtcatcgcaacagatgaaatgaacgtcagaagcggcccagggcttagctacggcattacagcggaagtaaaaaagggagaacgctatccaattttaaaggaagatggagactgggtgcagatacagcttggttctggagaaaagggctgggtagtctcctggcttattacaaaggaagaccaggccagcacaagctcctcaggaagcagtgacactgtgacatcaacagaccccgatctgcggatgagaagcggcccgggcacttcctacgaagtcatcggcaaattcccgcaaggcagccaagcatctgtcattgataaagattcgggctggatcaagatatcctatcacagtgccaccggatgggtatcatctgaatatgtcacatcaggaggcagcagttcagcgtctgatgagagtgaccaaaccgaggattccggtgcgtcaacgacgggcacagtcggtgtttcttcgctaaatgtaagagcctccgcctcacatgacgcggcaattataacaaaacttgatcgcggaacgaaactgacggttctcaacgagaaaaatggctgggctcacattgaggtgaacgggctaaaaggctgggttgcaagccattaccttttgactagttctgttccagctgatgattcagcaaatgccggcagttcatcctccgctaaaaaagcctatatcatgtacggaggaacgaatctaagaagtgatgcgtcaacatcagcttcgatcgttgagcgcgctgccaaaggagattcatacaccattaccggttcaaagggaagctggtatgaaataaagcttgataacgggcagactgcttatgtagccaattgggtggtccaaacgtctaaaagcgcagaagaagcaggtgaaccgccagtctctgattccccgtctggaaacggctctctaaacaataaaacgattattgttgacccgggacatggaggaaaagacagcggaacgatcgggtattcggggaaattcgagaaaaacctgacgatcaaaacggcaaaactgctcgccagcaaacttagatcggctggagcggatgtatatgtgacacgccaggatgatacctttgtcagcctgcagtcacgggtctctacctctcactaccgtaacgctgacgcctttatcagcattcattatgacagctatgcggatacctctacaagaggcagtacagcatattactacagtcctgccaaagatcaggaactcgcatcagatgtccactcagaagtggtgaagcgttcttccattccagaccgcggcgtattattcggagattattatgtgctccgggaaaacagacagcccgctatgctgtacgagctgggatatgtaagccatccgcaggaagaagccattgtacatagcaattcataccaagaaaaagtaacagatgggatcgaaagcggattagagaaatacttccaataaaaaaagctgccttttggcagctttttttattttgaatccataatgagcgtgaccggtccggagtttgtaagctgaacatccatcattgctccaaacgttccggtctccactttgattcctttttcacgaagcaggtcattccatttttcataaagacctaaagctttatcaggtttggccgcgttcatgtagttcggccggcgcccttttttcgtatctccataaagcgtaaactgtgagacggataaaatctctcctcctatatctacaagagacagattcattttcccttcactgtcatcgaaaatacggagattgacaactttatcggctaaataagctgcatcatcttctgtatcatcgtgagtgatgccgaccagcaccataaggccttgtccaatttggccgacgacctcttcgtccactgtaacgcttgcttctgttactcgctgaacaactaatctcttttctaacccctttagttcatgacgcggcgcacagaatagatatctctaatctgtttaatacgctcgacgactttatgcaagtgattgatattctggataaaaatcgccatatggatggttgccactttattgcgatccgatttgccagagacagatgaaatattggttttcgtttcattcactgcctggagtacctcgttcagcaatccgcggcggtcatacccaagaatctctatctcaacattgtattccttgcgcttttgaacttgtgactcatgttcccactctaccgggatcagccgctcttgggcttcattcgttttgacattcggacagtcttcgcgatggaccgaaacccctctgccttttgtgataaagccgacaatatcatcacctggcacaggattgcagcattttgataaacggacaaggaggttgtcaatgcccttgacacgaacgccagcttcccgttttcttccttgcgggtatggcttaggttccccagtgacttcctgaacgatcttttcctgttcttcctggtcgcgctgctttctctctttttctgttaggcggttcgccacctgcagagctgtgatgccgttgtaaccgaccgccgcgtacatatcctcttcatttgagaaattaaatttgtcagcaaccttttgaatattctccggcgttaaaacatccttcaattcaaaatccaagtttttaatttctttttcgaccagctcacggcctttttcgacattttcttcacgccgctgtttcttaaagaattgacggattttatgcttcgcttgggatgtttgggcaagcttcacccaatcctggctcggaccgtaggaatgcttagaggtgagaatttcaacgatatcacctgtccgaagcttatggtcaagcgtaaccatttttccgtttactttggcaccgattgttttattgccgatttcagagtgaatccggtaagaaaagtcaatcggaacagaaccggacggaagctcgattacatctccttttggcgtaaagacatacaccatgtcagagaacaaatcaattttgagcgattccataaattcttctgcatctgtcgattcattttgaaattctaaaatttcacggaaccaagaaagctttttctcaaaggttgcaccttcattggctgctttcccttctttataagcccagtgagccgcaaccccgtattccgctatttcatgcatttcaaaggtgcggatctgcacttcaagcggatcgcctttaggcccaataaccgttgtatgaagcgattgatacatattcggcttcggcattgcgatataatctttgaatctgcctggcatcggtttccagcatgtgtgaatgatgccaagcaccgcgtagcagtcctttatgctattcacaagaatacggacagccaacaaatcgtaaatttcattgaattgcttattttgcagcaccatttttcgataaatgctgtaaatatgtttcgggcgtcccgagaagtcagccttgatatttacttcttcgacacgtttcttcacttcattgacaacctcatcgacataaagctctcgttctgcacgtttcttcttcatgaggttgacaattctgtaatattgctgagggttcaaataacggagcgccgtatcttccaattcccacttaatttttgaaatcccgagacgatgcgccaaaggagcaaaaatttccagcgtttcattggagattctccgctgtttttcctgaggcagatgtttcagtgtccgcatattgtgaagacgatccgccagcttgatcaatatgaccctgatatcttgagccatagcgacaaacattttgcgatgattttccgcctgctgttcctcttgagatttatatttaattttgccgagtttcgttacgccgtctacaagcattgccacttcttcggaaaatgcttctttcaggtcatcgagcgtcacatctgtatcttccacgacatcgtgcaaaaatccgcccgcgattgtggaagggtccatttcaagatcaacgagtatccccgcaacctgaatcggatgaataatatatggctcgcccgatttgcggtattgctcgcgatgagcatcttcagcgtacagatatgctttttcgacaaatgcgatatgctcatcagatagatagctgcgtgctttatctataacttgctcggcagtcaatacttgttcgttcgccatggaatcaccttttttaaaatgtaaactgtattgtagtttattatcaagaaaaaaacgaaagatgtaaagagcagaagttcaaatagccaaatattatataaaataaatgcaaaacaataggaaaaaagcaccctgacatggagtgctttttcgttatgcggttatccttagtatttcatcaatgttaagatgtcgtaatcttcgagcttatttctgccgtcaaggtaagaaagctcgattaagaaagcgataccagcaacaacgccgccaagttcttcaacaagtttgattgtcgcttcaattgtgccgcctgtcgcaagcaggtcatctgtaataagcacacgctgaccaggcttaatcgcatctttgtggatcgttaatacgtcttttccgtattccaagccataatccactttgattacttcacgaggcaacttgccttctttgcggaccggcgcaaaacctacgccaagcgcgtaagcaacgggacagccgataataaagccgcgcgcttcagggccaacgaccaaatcaatttgcttttctttcgcatattcaacaatttgatctgtggcatagcggtatacatcgcctttatccatcagtgtcgtaatatctttaaattgcacgccctctttcgggtaatccggtacaattgttacgtattgttttaaatccatctgttttatgtcctcctcgtactttcataagcctctgaatcttgtttcatcagcttattcagccattccttcagctcttcagcagaagaataattcagcttttgatccagttccatcagctgctgtttcgcctgatatgtttgtgagtctgttaagtcgcgtttctttgctccgctcacaacagacagcacaccattctctattttaacaaaaccgagatcaaaaaacacctttgtcatgaaattgattgtttcaacggaccagcctttatgttttgcaagctctgaaccgtgttttttcacgtcaaaagcgcctcttttcagcaagaacgcataataccatttaaagtggtctcttgcgggaaaagttgataaaaagtggtcctcatgattgagaaaaataaaatatatccgctcgggcgcctttccttccagcaaacgtgcgagcatgtccagcgaaggcggcggatccagtaatacaatatatgcaccatcgaggtcaaacgcctttgcttgatctttagaactgatgacgtgcacttctcggcgaaggtcttcagtttgaagtaatgttgttgagtcttctttgaaagagacaatggcccgtttagcagatggaagggcggaaactgtgtcttcccacgtccgttttccccttaaatcaaacagctgccattcagaaacagcggcatcctttatcataagctgcggcttttttcgattgttccattcgttgattgacatctcaccgacaatggaaattcttgaacccggtacgatgccttcttgaagctcgcctttattaaaaccgacgcaatcaagctgggacgactcgtttctgatcgtcattttgacatgagttttatttgcccctatcttgcggacatcttccagtactgcattttctacgagaacgtgcggtttcgggttcagcatgccaaaaggagacagcatgttcatttctgcgatgctttcaactgtaatgtcttcgacgccgcagacaaggtcgacttcctgtacgggaataaaatcctcttccgtaagcgtattgtccgctatttcattcagcctgcttcgcaaatccggcacatcttcggctttcagcgtcatccccgcagccattggatggccgccgaaatgaggaagaatatctctgcattcagaaaggctctcaaataaattaaatcctctgatgcttcgggccgaacctttagcgattcccttttcttcatcaataccaagaacaatggccggtcggtagaaacggtccacaagctttgaagccacaatcccgacgactcccgggttccatccggctttggccacgacaattgcagtttgatcgagcccttgctgttcaaccatttcaatcgcttcatccgtcattttgctgaccattttttggcgctctttgttcagctggtcaatttctgcggcaagctcttccgcttcaaacgaatcctctgacataagcaaatgaacagcgggatccgcctgttcgattcttccgacggcattcagccttggtgcgagctgaaatccgactgtttcttcgttcgcttctccgatgtctccgcctgacagcttaatcagctcttttaagccgagccgatttgtccgtcgaagcctttcaagtcctagtgttgctattaatctgttttcgtcatgcagcgggactagatcggcaatggtgccgatagccgccaggtcaagcagttcatcaggaagttcacccaataaagcgtgggcaagcttaaacgcgactccaaccccggcaagctctttaaacgggtaagtgcagccaggctgcttcgggtggacgatcgcacggacatccggaagctccggtcccggttcatgatgatcggtaatgatgacatccagtccgagttcctttgccaccttcgcttcatgcacagcggcaattcctgtatcaaccgtaatgatcaaagagaagccccgttctttaatcgaacgaaacgcctgttcattaggtccatatccttctttaaaacggtcaggtatataaaaatcaacttgagccgacagtttttgcagcgtgtgaagcatcactgacgtacttgtaaccccatcggcgtcataatcgccatatatcataatcttttcttgttgtgaaatcgcctgttttattcgatctgccgcttctttcatgcctttcatttcaaaaggatcataaaaatcggcatcctttgtatgtaaaaacagcctagcgctttctgccgtatcaaagcctctttttacaagcagggacgcaacaagaggtgttatatgcaattgttctgtgagtgatttgaccttatcctgatctggtcgctggatttcccatcgcatttttgacgctaacataaattcacccctcaaccaccctattatactagagcaggctgaggggtttcaaataatattcgaaaactagtcttttttctcaatcatggctgatgcatcctgtgtgtcagtctgatcagcaagatgagtatcctcttgtttatgtattgctgttctattttctttccgcaaggtttttatttcccgcttcaatttcattacctgaaaaatgccgacagaaaatacgatcagtgctcccattaaaactgagcccaaaataacaagaatgagcggccattctgatcttccaaacaggtaatcaacttctacggatcgaacattaatgactgcgaaaatagcgacaattaaggtgaaaataagtgcgaaaataatggtccattgtttattcattctcttttcccccaaacttcttattgaggtaactttcccaatcaagactggttttaaacatggcttaacactaggttaagctccctttgctgttaatttttcccggatcagcctcttcagtccggttccctcaccggaaatcacaagtgtatcgccttcgtcaatgactgtttcagagctcggattcagttgtttatcctgattctttttaacaattgcaatgaccgtcacatgatattcctgacccacattcaaatcaccaatcgtctgatgaatggcaggcgctcccgcctctgctttacaccactctataatcaaatcatcaagggctgactcgacctgttctaatgctttcggtttatatgccattccgccaagaattgcagacatttgccttgcttcagcgtcatcaaactgcacggaggcaacacattcctcatggtcgttttcgtcaaaatagtaaagctctctccgtccgtcatgatgaatgataattgaaattttatcacggtttctagtaatcatttcaactttttgtcctatgcccggcagctctgattcgcgaaccctcatatataaaccctcctacatatctgaaaaccagccataaacacttttaacaccatatatatgtttaaatgtaagcgtatgtcattatagcaaatgtctattttaagttcaatgaaacttcaaaaaacaggctgccctgcagaggacagcctgatattttttattgcgccgaatcttttttcagttctcttcctttccatgcaagccaaatttgtgcggcaatgtatagagaagaataaacgcctgttaacagcccgaccaataaagcaattgagaagttagtaatagaagatgctccaaagatcagcaatgtcacaacaacaatcacaacggttaatacagtgttaattgaacgtgtaaaggtttgctgcaggctcaggtttacaatatggttcagatcggcaaaggttttcggcttacgctttttcatatgctcgcggaccctgtcaaatgtaacgattgtatcgttaatggaatacccgattatcgtcaagatggccgcgatgaatgtaacatctacctcaagccttgtaatactgaagaacgtgacgataaagaatgcgtcatatagcaatgaggcgatggcagcaatcgccattttgtattcgaatcggattgaaacgtaaataatgatgccaatagaagctatagcaactgcgtacagcgcatttctcgccagctccttaccgactgtcggtgaaactgtgctgacatttggatcagatccgtatttgtctttaaaatacgtttttacttttgcaatggtttctttatctggcaccccgacaaaacgggcaacaccgatattgctcttttcgcctgacagaactacagtatcagggtccatacccagagattcaaaatccttctcaacttgctctgtcgtcagcttatggtcgctttgcacttcaatccgtgcaccgcttgcaaagtcaatgccaagattcagcctgaacacaagcaggataataatcccggcaaccgtgaccgcactggagaaaataaagaagtatttgcgtttgctcgtgaaatcccatttttggaatggcgtatgcggctctgtattttcatccgtatcctgaatatccatgatatgtttcttattgacaccaaaccagccttttttccgatcaagccatctgctttccacaaggagagcgaggagaaatctcgataagaaaacggcagtgataaagcttgtcaaaatcgataggatcagcattgtcgcaaaccctttaacagagcttgtcccaaagataaagagcacaaccgctgcaataatggttgtaatattcgcgtcaaaaatcgtcgcaaatgaccgtctgtttcctgaacggaaggcagagcggactgactttcctagcttgagctcttctttaatccgctcataggtaataatgttggcgtcaacagccatcccgacacctaaaatgagagcggcaattcccggaagcgtgagtacggcattcatccagtcaaagatctggagtgtaatgtagatataaacagacagcgtaatcaccgcgattaatcccggcagacggtaatagaaaagcataaataagaaaataattgcgataccgacaataccggcaaacaccgtatcatggagagcctgctggccgaattgcgcgcctactgatgtcgaatacttttcagtcagtttcacaggaagtgcgcctgcgtttaaaatgctggctaaatctttcgcttcttgagctgtgaaatgaccttcaatttttacatcagttgtatttagttcctgacttacatttggagcggatacaaatttaggatgctctttttgaacttctttcttaaaggaatcacctttatcataatccaaccaaatgacaagctggttgtttggcgccattttcatgaccttcttggtcacttcaccaaatttatcagcgtctttcagcttaatcgtgacaattggctcatttgttgtgctatcataagtttgtttagcgccgttttcgactagatcagcaccgtttaacagttccttatcatttgcatctctgaaagaaagctgcgcttcagtcgccaaaatttcacgcgctctgttttggtttgtcacgccagcgagctgaacgcgaatccggttattcccttcaatttggatgttcggttcgctgacaccgagaacattggcccggcggttcagtgcctctactgtgctgaccagaacgtcttttgtgattttgtcacctttttttacaggctgtacatcatacagcacctcaaatccgccttgcaaatccaatcctaacgtaatattgttagcggcaggcttcgtaaagtagcccaagcccgtgccgatcaatagaacgaaaaggaaaaacgcaatcaagcgtccttttttcattatgtatatcctcccttaaacctgtgcgaatcaacctgctatctcagcagttcttccaatgcttcctggccctcttcactgcccagccaattagacgttttaaatgactcaacggttgcatagttcataaattcgccaattttcactgataaaatatcactcgccagttcataaatgctcagttccgttttctttttccacttcttatctgttaagtatgaccacaaactttcgagttcaacatcatcatacccgagaatcttaaactcttccagtttgctgtaaagaaacggcctgacgtggtctttatatagatcggctggatgcttctccacgaattccacgctccttttttattgtttttcaagaagacttgtcatgcttggacgacatatacgcatatctttattgtatatgattccaggtagtttgagaaggcagggggtaaaaatggcgaaacagacgtttttaaagggcactcttatccttatcgcagcaggaatggttacaagaatgctcgggtttgtcaaccgggtggttatcgcccgttttatcggtgaagaaggagtcgggctttacatgatggcagcgcctactttcttcttggccactacattaactcaattcggtctgccggtcgcgatcagcaagctagtcgctgaagccagtgcgcgcggagatcatcaaaaaacgaaaaatattttagtcatgtctctgaccattacgggagtgctcagcctcatctttacaccgctgtttctgtttttcgcccctgttatggctgaaacgatgctgacagataagcgaacactgtatccgctcttggccattacgcctgttgtgccgattattgctatatcgagtgtgctgaggggatactttcaaggaaaacagaatatgaacccgcttgctatgtcacaagtccttgaacaggttgtccgcatttcactcgtggctgtctgcacaacgatttttctcccttacggaattgaatatgctgcagcgggggcaatgctatcctcagtggcaggggagctggcatcacttctttatttattcgtttgctttaagtataaaaagacaattaaaatcagaaagcattttttacagtcaattaaaaacggaaaacaaacctttacccaattaatgagcgtgtcccttccaacaaccgggagccgctttatcggaaacctctcttggtttttcgagccaatcgtcgtcgctcaaagccttgccatcgccggtgtggcaacagttgccgcaacaaagcaatacggggaactaaccggctttgccatgacgctgctgactctgcccagctttattacatattctttgtcgaccgcgcttgttcctgcgatcagtgaaggaatggagcagaaaaaattgcaggtggtggaataccgcttagaacaggcgatgcgtctctgtctgctcagcggaggcatttcagttgttattttatttgtatttgcggatgagctgatgagagtgatgtacggttcctcaggcgcagctgtatttataaaagtgatggccccgttttttctgctttattatttccaaggcccgcttcaagctgtgctgcaggcgcttaatttggcaggagctgcgatgatgaacagcttaatcggagcgcttgtcaaaacaggccttatttttgtccttgccacaaggccttctcttggcattatgggcgcggcattagccattgtgacaggcatggtgctcgtcacgctattgcacgcagcaaccgtaagcaaagtgctgccgatcagcatcaaaatcaaggagtacgcgctcagcttcgctgttattgtaatttgcggattcatcagctccgccatcaaacaatatataagctttggagcatctgaggctgtcaatctagccggatggattgcggcgagcgccgccatttatatgatcctcctgctcgttttccgtttaattaaaaaagatgagcttcgccgcattcccattatcggacggttgatcatccgataatggtcacgtgcggtgcccatctttttcatcaatatatatttctccgtctgtaaacgagcaaaatgaaatatctgaagggtttgtgtatccgtgtttttgcaaactttcaagcagccattttctatctttactgattctggacaggttttctgtttgaatgaagccgtctataatgagcggcatttcgagctgccgatgctctccgctgttttctttcttaacaatagtcagtttgcccgacggctctaaaatagcaaatgatacgtcagctactctgtcgatgctattttctctgagctgaaccattaaatcatcaaaattataacgctgtgatttcatggcttcttcgtcaatttttccatatttgataattatggtcggcttaccgtcaagaagctggcggacttttcggttttttaaagaaaagtatgccaaagtcacttgaatgatcattaatacaagcattggcaaaatggtatgaaatagatgatcgtctacgttttctatggctaaaacggcaatttcagccatcatgataaagacaacgagatctaaaatactaagctctccgatctcccgtttgcccatgaaacgaaaaatgaccaatatcacaaaatacaatacgactgtgcgaaacgcaatagtgagaagctcttccattatgcacctccaactcattataggttgcaacaaaatgatcaatttatgtaagaaaaaccgattgcatttcacaaagcttttacgtctaattcatgggataagggaatacatttttacaaagacgagccatcagcatgtctgacggttttgaacaaaaagaacagaagccttttaatacaggcagagaggagacaatcatggaggaaacgaaacaagttggaaaaggcattctttacggcttaatcgccatattttcagccatgctcctgacaagtttagcggtttcacttttattgaccgcaacctcgctggaagaatcatcatttaactggctgatcaccgctatctcatttctctctttatttatcggcgggttcatttcaggcgggaaaggcaaggaaagaggctggatgattggcgcattgaccgccttaagtttttctctgattatcttattgtttcagtatttaggattcggaaagacatttacagcagaacagctgatcttccatctgggatttttaggggtgtgcatgctgggcgggattttcggcgtgaacatgaggggaaacaggtcttccacataaaaaagagcgggctcacttgcccgctcttttttgtttgctatgtatagctcctgctgttattcagcagcagaaacttctctgatcgcgcggcggtcgaacgtaagacgtgtgttatcaccagtcttaattacgactttgctttcgtcgatagagtcaacagtaccgtgcaatcccccgattgtcactactgaatcgccttttttcagttcctcttgcatttggcgtacagccttttgctgcttttgctgaggacgaatcagcaagaagtaaaggaccgcaaacattaaaataataggaaccaatgtacctaaagtgccagtcatcattttcacccctttctgtaagcctgttatgtttatttagaagcttttcgcatttggcttgttatagccgtaacgctcaaagaactcttctctgaaatcacccagacgatcctcgcgaatagcctgtcttacctgctccattaagtgtaacagaaaatgaaggttatggtaagttgttaatcgaaggccgaatgtttcattgcagcgaatcaagtgcctaatgtacgcgcgagtgtagtttttacatgtatagcaatcacactcttcatcaatcggacggaagtctctttcaaatttcgcatttttcatattgagtcgtccttcagcagtaaacactgtgccgtttcttgcaatccgtgtaggcagcacacagtcaaacatatcgaccccgcggatcgctccgtcgatcagtgcgtccggagaacctactcccatcagatatctcggtttatccttcggcaagagcggtgttgtgaattcgagtacacggttcatgacatccttcggttcacctacagacaatccgcctatagcatatcccggaaaatcaagcgaaatcaagtccttcgcactttgtgtccgcagatcttcatattctccgccttgtacaataccaaacagcccttgttcatcctgacgattgtgggcattcaggcagcgttccgcccagcggcttgtccgttcaactgacctcttcatgtagtcgtactccgccgggtatggcgggcattcgtcaaacgccatcataatatcagagccgagtgcgttttggatctccatcgctttttccggagataaaaacagcttgtctccatttagatgattgcggaaatggacaccctcttcctctatattacgaaacttgcttaaagaaaagacctgaaaaccgcctgaatctgttaaaattgcgcggtcccagttcataaatttatggagcccgcccgcttctttgacaatgtcttggcccggacgaagccatagatgataagtgttgctcaaaatgatgcctgcatccattgctttcagctcttcaggcgacattgttttgactgtcgccagtgtgccgaccggcataaaaaccggcgtttcgaaggagccgtgaggcgtatgcactttgcccagccgcgctcctgtttgtttgcattcttttataaattcatagcgtattggttgttcagccacttttgatgaggcctcctgttctcaaattatataatcagcatcgcgtctccgaagctgaagaaacggtattcctcttccactgcatggttataggcacgcagaatgttttctcttccagcaagcgcgctgaccagcataatcaatgacgatttcggcaaatggaagtttgtaatcattccgtcaatggctttaaattcatagcccggataaataaaaatagatgtccagccgcttgatgctttaaattgcccgtcatgttctccggcaatcgtctcaagcgtgcgtgtcgaggtcgtgccgacagaaatgatccgaccgccattttctcttactttgtttaaggctgcagccgtttcttctgacatttgataaaactctgcatgcatattatgctcttccacttcatcggcactcacagggcgaaacgttccaaggcctacgtgcagtgtgatgaactcaatttgcacgcctttgtctttcagctgctgtaagatttcttccgtgaagtgaaggccagctgtaggcgcagcagcagagccaatttcttttgaatacactgtctggtagcgctctttgtcatcaagctgttctttgatatatggagggagcggcatctctccaagggattcaagcacctcgtagaaaataccgtcatattgaaattccatctttctgccgccgtgctcaagctcttccgtgcagattgccttcaatcttccgtctccaaatgtgacaacagttccttttttcacccgtttcgccggtttggcaagtgtttcccatttatcaccggtttcctgtttcaacaaaagaagttccactttcgcgccggtatcctcttttgtgccgaataaccgcgcaggcagtacccgggtattgttcaggactagacaatcgccttcgttaaagaagctgataatgtgtttaaacgagctgtcagtaagctctcctgtatgtttatcgagcaccatcagccttgaagcatcacgctgctccaacggtacttgtgcaattaaacgttctggtagttcaaaatcaaataaatcgactttcatgatgatttcacctttattctagtcttttgttatttcattctgccaaaaagattaagcaaaattgataataccacacttataataatacaagtgacaaccgggaagaaaaacgtaacatttcctttttttacaaaaatatctcccggcatcttgccgacaaaatgcaaaactgctccgataataagcaaaacagcaccaagaatcataatgatcttaggaaattcagtcatatcggggagcctccatttggaaatgatgataaacggccggtgtcacgatccttccacgcggcgttctttgtataaatccaatttgcagcagatatggttcatatacgtcttcaatcgtatgcgattcctcgccgatggtagctgaaatcgtatcaaggcctactgggccgccgttgaatttttcgatcatgcccatcagcagcttatgatcaatatgatccaaaccgaggcggtcaacctgaagccgctccagcgcattctgagaaatgtcttccgtaatcctgctgtcacccagcacttgggcgaaatcgcgcacccttctcagcaggcggttcgccacgcggggcgtccctctcgatcttcttgcaatttcaagagccgacggtttatcaatctcaacctcgaatacatcagcggttcttgtgacaatatccgccagttcttcttgtgtatagtactcaaggcgagacattacgccgaatctgtctcttaaaggagccgtcaaaagccccaccctcgtcgtggctcccaccagcgtaaaaggcggaaggtcgaggcgaaccgagcgggcagatgggcctttgccaatcacaatgtccaggcaaaagtcttccattgcaggataaagcacctcttcgatcgatctgtgcagcctatgtatttcatcaataaataatacatctcccggttccagcgccgttaatatagcagccaaatcaccaggcctttcaatcgcaggccctgatgtcgtccgcaattccactcccatttcattagcaacaatcgaagcaagcgttgtttttccgagtccgggcggcccgtacagaagaacatgatccagcgtctcctgtctcattttcgccgcatctataaacacgcgcaaattttcttttaccttatgctgcccgatatactgtgccagattttgcggcctcaggctttgctctatcactgattcatggttgtctgcttcacttgagacgagccgttcatccatgaacatcaccttactttaatagtttttgtaatgcttttttcacatattggtctgttgtcagcccaatttcttctttaaggtgaggaagcacctttttgatttctttttcagcatatccgagaaccctgagggcttcaagtgcttcttcaagagccgtttccgctgtttgcttttcaagcctttcttcatgattaaacagattttcaatcatttcaggcacaacatctgccagctttccttttaaatctagaataatctggcgtgcggttttctttcctactccaggaaacttgaccaaaaaagcttcatcttcattttcaattgcttggatgaccgctccgggatcacccgagcccaagatggcaagtgctcctttcgggccaattccggtcacgtttaacagctttgtaaagagcgccttctcctctcttgttgaaaaaccataaagcgaaaaagcatcctctctgatatgatggtatgtaaaaatcgtttcttggcttctctccttatatataaacggattcggcgtgaaaatctgatagccgatgccgccgttctctatgacaatatattggggagatacataatcaatcgtccctttaacaaattcaatcacgcaaattcacctctttgactgttcttcattgtaccataaaaacagccaaagtcttatagaaaagttaacatatgttcgcttctctctcattctttcacgaaaaaaaagacatgaatacatgtcttcaatcagcggacgctacccgctgtatgtcttcatatgttcgatgacatcctcaaactccgcttttgtccgaaatggaatgcctttcagcagatttttttgcatatggctttccagcctttctaaatcaatttgaaaaaaagactgaattggttcggaagctggctcaggccgcccatgaaaagtggaaatcactccattatccgatacaccgatatacccgttgaccttgctgagcggagaaatatcgtccatttgcttccggaagagcacatatccctttttttgttccactagcgtccatccggcataagctgcccaaaaatcatccatagaaaacactttttcatgcttatgctcaatgctgacatcgccgtccaaatacaccttttcaagctgcacatgcacctgcagcggctcatagtgctccacttccgcgccaagtgcgcgggaaggagctcctattaaaaatactgccgctgagcaaagaatgcccagcaaaagatacgccgtgctgaatcgtttcaccctctacacctctttgcacacgtttatgattagtttgaccaaagaggctactgcttaaccgttttatcaaaatttgtctgcacattttccctgacaaaccgttcctccgtatacacatctgtgctttgctcagaaattgtcaagaatcgcgtcagaaaggcactgaaaaaatacaatgccgcaaagatccaaatcacgccacctgcaccgagcggcccaatgaaaagactcacgatgcccggcgcgataaacgcacataaaccagatcccaaattcaacactgacatggcagcacctttattatcaggtgcaagcgtcggcaaaagcgcgcttaatgggacgtaccctgctaaagccgcgccgtagcagcaggcgataatcatgagcacccaatactgatgcccgatcagctgaggcgtgtaatacagcgccagcgtaaaaataccgcatccgacaccgccaaaccacatgaccgtattgcgccagcctagtttatctccgactgcaccgaaaatgatattaaacacaatattcacaaaaaacagcgtcccccatatttgcagccattccgaaaccgaatacccgtatcgtgctaaataagtaggaagaaagatggcaaatccaaattgtcctatcgcattaatcgtcttgaccactccgccgatgcctaccttagggttttcaaacataatcgtaaatgccttcgacagttctttccatttcggctgatcttgtttttgtatcggagtaaatttatctttgttaaaaaataaggcaagaattccgcctgccgccacaaacagtaaagcgctccaaagcgtattgatttctccaaaggccggaactgcatagctggaatagaacggaccgagcacgttaaggccgcacgtaaacataaaccaaaaccagccgacggcttttccaagaatattttgagaggtgctgtatgacacccatacgagaaaagagtatgcaaacagcggatatcccaagcctctaagagcatagctgcccaagagagccggataatacatatgaggaatcgcccagccgataaaagcggccgaaccgaggataaatgcaagcaatccgacagtcatcgtttttctcggcccccaagtttggacaaacgttcctgaaagccaagctgagatggtgacagcaatgccgtacatggtaaataacgatgcggattgctgcatactgagaccatgatcaacgagaaaaggagacagccagccttgttcgaggccgtctccaaccataaagatgacaacgccaatataaccccaaaccatgtgagaaggaattccgattttgttcaaaacatttcctttagcatgtactgtattcattttctccaccgcctacttaaagtatcaatggagtatatacccaagcttgctgaattgtaatcctgttagattaaaaagcgattttttcagtgtgctcaatgctaacaggcatgccaaaagcaagcgattgctgtgctgctctggcgatcctcccggcctgtaaaccgtcattgccggtgcagggagtctcctggtttgtgccgatcgcttctgcaaaacggagaatctcctcctcatatgaatccttatagcgttcaaggaaaaagaaatgcggtttatccttcatcacaaaatcagctgttgacacctcaaccgttgtcggcctgctattgtcagccgctgcagagcctttcgtcccgaaaacctcaacccgctggtcatatccgtacacagcttggcggctgttatcaatcacagccatggcaccgttttcaaaagtcagtgtaataacagctgtatcaatatcacccagctccgcaaaagaaggattcaccaaagccgcccctttggcatacacttccgtcacttcgcttcccataatatatctggccatatcaaaatcatggatcgacatatccataaacaatccgcctgacgtacggacataatctatattcgggggttctgggtcccgggacgtgatttttaataaatgaggtgtaccgatttcaccattttcaacaatcgttttgattttcttaaaatgaggatcaaagcggcggttaaatccgacttgaagtgttaccccgtgtttccggacagccgcaagcgcttcactcgtttcgtccagagagaaactaacgggcttctcacaaaatatatgctttttcgcctcggctgcttctttgatcatctgtgcatgtacggctgtaggagagcaaataaaaatagcatcaatatcaggatcatgtaataaatcacgataatcagaggttatgtattcaatctgatgactgtcggcccagctttttatacggctcgcctgaatgtcagagattgcttttattttcatgtgaggaatccggcttatattttgaacatgaagtttgccgatgcggcctgcaccgataatccctgtcacaatctgttttgtcatggcttcttcccccttgatcattcacgaaagcgctttatttaaaattaatactatcccatttgtaagcgcttttcaagaatggaaattaaacgttctatgtctcttttatcacaattcatgcttataagtagccttcttcttcaagaccagatacactagaattaggctctttttcctgaacagtttatgattttcctataaacagctgcataaaatagagcaaagaaggtgaatgaaatgctgacaaaagcagaggcactggcccataccgtcatataccgcaagaacagcagatttgataaagtcaaagagaaatccgaggaattaacactaatcggcaagggaagaagcgcctatgtgtttgccttaacagaaggcggtcgaaaaatggcgctgaaagtattttttccggaatatcaagcgacagcagtcaaagaagcagcgatctatgaaaaattagccgggtccgcattctatcctgacatttacgaaactggcgattcatttattctcatggaatatattaaaggtgaaaccttttataactgtctgaagaaaggcattgcaatcagtgatgacatgattcagcaggttgaagaagcgctttctgacgcccgggcagccggactgaacccgtcagatattcatttgcggaatctgatattgacagaaaccggggcggtgcgggtgattgatgttgcgagatttgagcagacaaaaacatgcacgcagtgggacgacttaaaatccgcatatcatgcactctacaaaaaaccgatattccccaaaaagattccgggtttttggctggagatcatcgcatttttatataagaaagattggtttcaaaagcatttcgcacagcggaaaagaaaatattcttaaatcaaaaaggcagccgcacaagcggctgcctttatcatgtattttttactttctgacggcagaaatcagtttcatttgttcaggcgacagcttaattcgatagcctctcacagttaagtagaccgcttctgggtccttctcgccggaatgacaatacgttttttccatttctgtctcccctcaccctttattggctttatttcatcttatcattgctttattgaggtaattttaaagaaatgtaaagattatatgaatccgatatatagtaaaatgagagaaaaaaagggagagagtcacattaagaccgaaaacaccttgagcttagatgcagccagaggtgaacttgtaaatgaaaaaacacttgtcaagagaacaatctactggaattacccggacagccgcccagcagtgacgtggatcaatcacaatacagtgaaaatcggcaatcagactttacatcttgatactgatgaaacgtatgattggcgaaaagatgatcattggatccgtgaagaaccgccgcaggcgtcagtgaggtgatgaaacatgaataagatgaacggaacaaatgatgaaaagcatttcaatcattttgtgattgctttatcctttatatacggtttgactgaactaggctatttgttgctgaaggattttataacaattgccataagtttgcctctgtagaaaaacgcagcgtagtcgatacgccgcgttttttctttttcccttcctcttcttattgataattacaggtcatataatgtgacaaatcgattgtagaaatagttcgattagaccaaaatcctttttatacatgtattcgaatttgaagtgagggggaagcttgatggcagattttgttgctagtttgaatgcggtcttatggagtacgcccgtcatttatattttattgggaattggattcgccttttcaattatgacccgttttttacaagtccgacatttaaaagaaatgattgttcagatgttcaaaggcaagagctctgaagccggcgtttcatctttccaagcgttatcgattgcgctgtccggccgtgtgggcacaggaaacatcgcgggagtggcgacagcaattgcattcggcggacccggtgcagtgttctggatgtgggcgattgcctttatcggggcggcgagtgcctttgtagaatcaacgcttgctcaaatttacaaagtgaaacaagacggtcaatatcggggcggccctgcttattatatagaaaaaggcttaggcattaagtggtttgccgtcttatttgccgctgctgcccttattgcaatggcctttctaatgccgggcgtacagtccaactccattgcggctgggatccaaaatgcattcggcatctctcctttcgtcacagggtgcggtctggttttattattagggttcattatttttggcggcgtcaaacgaattgccaatgcggcgcaaatgattgttccatttatggccattggatatatcctgctgtctttgattattattgtcatgaatgtgtctgaattgcctgctgtgatctcattaatattcaaaagcgccttcgcattggattccgcttttggcggcttgatcggtatggcgatttcctggggcgttaaacgtggcatttactcaaacgaagccggccagggaacaggcccgcatccggcagctgctgcagaggtttctcatccggtcaagcagggactggttcaggcattttctgtttatattgacaccttgtttgtatgttccgctacagctttcatgatcttgtttaccggcatgtacaatacccaggctgcagatggttcctttatcgttcaccagcttaaaggcgtagaagcaggacctggtttcacacaagcggcaattgacagtgttcttcccggattcggtgcaggctttgttgccatcgctttattcttcttcgcttttacaacaattatggcgtattactacatcgcagaaacaaatatcgcctatttagcacgaggcagagaaagcaaatgggcgatgcttggcttaaaactgattattttagccgccacgttctatggtactgtgaaaacagcttcacttgcttgggcattaggggatgcagggcttggcattatggtatggctgaacgtcattgccattgtgctgcttgccaagccggcgctccttgctttaaaggattatgagcgccaaaagaagcagggcttagacccgatctttgatccaaaagcgctgggtatcaaaaacgctgatttctgggagaaagaatacactcatgaaagtgaacgtgtctcctgaacatactaaaaccggcccgatatgacctcgtgccggttttttatgaacgatagtttgtatacacttcttgaacatcatcgtcatcttcaaggacgtctattaatgtttccagcttctcaacagcctgatcatcggcttctgcataggtattgggaagcatggtcacctccgccgaagaaattagatatttcgattcgagggctgttttcacctcttcaaaatgctcaggctctgtgaaaacctcatataggtcttcttcaattcgcagctcttctcctcctgcttcaagcacatcaagcatgagctcatcttcttctatttgccgttcagtacggtctatcgtaatgaacccctttcgttcaaataaaaaggctacacatccgctttctcccagacttccgccatttttattaaaggctgtccgcacatttgacgccgttcggtttttattatctgttacgcattcaaccatgacggcaatccctgaagggccgtagccttcataggtgatttcttcatagctgcttccgtcttggcctcccgcagcttttttaatggcccgatctatattttcattcggcatattggcgccttttgctttttcgatgacaagacgcaatgctgaatttgcttctggatccgctccgccttctttcgctgccacatagatttcttttgccagcttcataaatattttcccgcgctttgcatcctgtgcattttttcttttttgaatgtttttccacttggaatggcctgccatgttttcaccttcttttacattttctatgtacactttaatgggaaatgttcgctgatgcaaagaaaaaggctgccgaatatcacttccggcagcccttccttcctagcggttgttcattttatgaagttttctgaacagccctttatctgttgatacttggacgtcacggccatttgcatagttgcgcgctgcttttacaacattatctctgtcagactttgtgaactctctgtggcttttgactgcgataactactcggtcatccgataccataacttgtgtgtcattgacgtttttcacttgtttcacacggttggcaatttttgcagccagtcttctgttttcttggttgtcatacccgttgttcgctgcattccgattcatgtttcggttattcgtgttgttatatgttccgtcagttgccaaaggaacacgatcgtcagcagtaacacggtcacggttatttacattcgtggtgtttcggttaccgtcgttctgatcctccattaattcagaaacaggaccatcgtggtcgattccgtctccctgtctatcggcgtcattttcatttgtataatatccgattggacgggtattgccgttattgcgcgtatcattcatagcattatcgtttgctccgcatgctgttaagccggctgtcattagaatcaggctagcgatcgtcatttttttacccaatggaaaaaccccccgtggacgaattgagcatgtttgctcgcttttatcatgtgcgtatggggggcatgttaagcgtgtcagttctctccatttggcagtgatctgcttgaaaacaaaaaaaggaacgatttacatcgttccgaacgatcactcattttcttcttccggacggccaaacatttggtttacagaaggctggttcgtcattggcatagaaactcctgccgaatatgggtttggatttgggttagctgtgccatatggcatattagggcttccataagctcccattcccgaatggccaggtgcagagaaatatggctgatgatcaccgtcacagccgcagtcgtcatgatctttgtatggcatgtaaccatgagccgcagcaggctggtatgctcccattacttggggagtgccgtaataagggccatacggcatatgtccatacggagatccataagccggagatgcgtattgcggcgcaccgtatgaaccgtaatgtccgtgatggctgttttcatgatgctggttttcataacccgggtcatactgaggcgatacaaagcctggctggtatccatgcatcggatgcattggataagcttgtgccggatagtacggatagcataatcctgatcctggaagaattggcgaaacaggcaccggacacggtacgaaatgagccggataatgataataaggctgaacagccggcatcggcatattcggaactgtgtgatgaacgttttcctcttctataccgcctacctctggcgcctttggcatattaggcatattcggataatttgcattttccatattactcatagcctcctgttgtggaaattggtcttgcatatgatacatatgatccatatttccgtcatgatgttttttcggctcctccggtttaggaggcgaccaaggctggaaaagctgtttcatatcataataatcgttcacatcagcttcagggtacacattttcctgcaaattaggcatcggcgggacatacggcatggacttcttttctttcggctttgtgtcttctacatcgacaacggatttaggcttctctttcgcatatggatgttcttgcttcacactcccggccgcaggacttttgcccgcttttggctcttttctgaccgggactccttctgacggcacttttattttcattccaggcatgattaagtctggattgctaagctgtgtattgagttttttcacttcctcaacatcgactccgtacttttcagctattttccagagcgaatcgcctttttgaacgatatggattttcaacgttttcccctcctatgcaaaacgtgaacagttcagctgtgattacaatatgtttcttcacaacatatgcctgaacaaaagaagttatgagtaaaggaagggaaaatatttctgatctacgtgatcgaaagcattcgattcagggcaaggagtgcatcttcctgaatggcttttggcaccttgatgacgcctgaaggttctcctttttcaatttgttccagcgaccacaacaaatgcggcaaatcaattcggttcattgtcaggcaagggcacatgtcagggttgagtgattcgatttgtttatctggatgctcgtgaatgatccgctgaacaagattcatttctgtcccgattgcccacttgcttcccgccggagcctggttgattgtgtcgataatatatttcgttgatccgttatcatcgcttagtgtcacgacttcgtgtgaacattccgggtgcacaatgatctgaatgtcggggtctcgctctctcatatcatggatatttttagtggtgaatttctcgtgaacagagcaatgccctttccacaaaatcactttcacattcgtatgcccggattcagctactaattcatctttcatcggatcccacacagccatatcttcaagcgcaatgcccagatcataagccgtatttctccctaaatgctgatcaggcaaaaataaaattctttttttctgtgtaaacgcccattcaagcacttttttcgcattcgaagaagttacagttgctccgccatgctttccgacgaatgccttgatctccgcagtggagttcacataagttaaaggtatgatcgtatctccaaatatatgctgaagcttcttccatgccctattggtctgctgcatgtcagccatgtcagccatagaacatccagctctcatatctggcaggacgaccgtttgctgctcgcttgtcagcatatcggcggtttctgccataaagtgaacgccgcaaaatacgatataatccgcttctttgtttttttccgctacttgggccaattgcagggagtcgcctgtttggtcagcaaattgtatcacttcatccttttgataatgatggcctggtataaagagcctgctgccgaactttttcttaatggcggcaacgcgcgtttccatatcctttctcgatagttctttataactttcgggcatcatatcattcgattgtttgatcacatcaagaattgacataacagcattcctccacagattcatttgataacgtaacatccatgctgatatctaaacttttgacggaatgagtcagaaatcctaatgaaatataattcacacccgtccctttaaaagcaggcaaagattctaacgtaatcccgccagaggcttcagtttttatattagccggtgtgagctttgcaaaatgacggaccgtatcaggcggacagttgtcaaacataataacatccgctccagctgcaattgcttcccgcagctgttcctccgtttcaatttccacctcgatatttaccatgtgccctgcggcctgacgggcttttttgcacgcctctaaaatagagccgcatgctgcgatatgattatctttaatcatgatgccgtcatacaaaccgaatcgatgattatacccgccgccggctctgacagcatatttctccagcattctgagccccggtgttgtttttctcgtgtcacaaattttaatctgttcatcatccagacaccgaacagcctctcttgtcattgtcgcaattcctgacagcctctgaataagatttaatacgacccgctctcctgaaaggagcgcagctgcgggaccgtgtaactcggcaatcacttcacctttatgcaacatgtccccatcttttttgtgtaaaatgctttgaacattttcgtccaataacgaaaagccttcttttatgatcgctgctcctgcaaaaataccctctgactttgcaacaatctccgcttcacagctctgttctccaaaaatagactgcgatgtaagatcccctgtcccaatatcctcaagaaaaaagtgattcagtaattttttcagctgtaaatgattcattgttccaaatcccctcgttttttctgatcttcgttcctttttttgtatggacaatttgtcttccttgccagctcacctcagcatgaggaaaatcggtgcggaagtgagcccctctgctttcctcccgcaaaagcgcagaaaacgtcatcagctttgcagtttgccatagatgagaaagttccatctgccgaattgtgatatccttcacatttacttcctgaaaaggcagcgtatgaagccagatgctaagctcaatcaaactgctttgttcccgcagaatagacatgtggcttgtcattttgctttgcagttcatgcccctctatatccggcacctcgtagaagacactggtttctagccctgattgatattgcctgttataaaccggtttttggataatatgctctgctgccctttttccaaataccagcgcttccaataaagaattgcttgcaagccggtttgctccatgtaaaccggagcatgctgtctcgccaatcgcataaagccccggcactgtcgtttctccccagcgattaactgaaacacctcccattaagaaatgcattcccggagcaacaggaatttttccgctgtggatatcaatccctgctttttcacaaatagcggtgatggtagggaaacgcgtttcaaaatcagaaatcgcactgaagtctatataaacgcgatttccttttgccatttcttcgtgaataacccgtgagacaatatctcttggagccaggtcacctaaaggatgccgttcagccataatcctgcggccgttttcgtctactaaacatccgccttcccctctgacagcttctgaaacaagcccgtaggaaacaccatttttcacaagcagtgtcgggtgaaactgagtaaactccaaatccgttaattccgccccggcccggtaagccagagaaagaccgtcacctgtgacagtgagatcattcgtatggtgaagaaacaggtttccacagccgccggcagccagcacaacttcgtctgcgtgccttaccttgagccgccctttgctgtcttttgtcatgacgccgatacatcgtccgtcctctataagcaaatctgctgccgtttcattctcgattaacttgattttgctgttgatccgtttgagcaaataatcgataagcagcctgcctgttgcgtctccgcctgcatgaaatatgcggttgtatgagtgggccccttctcttccaagacaaacaccgcctcgttcattgcggtcgaatggaaatccacgctccaataggctttgaaccatcatttttccatcatgtaatacgtctgctacaatagctagattattatggccgcaccctgcgtataacgtatcctccagatgggcttcaatcgagtcatcttttgcataggccgcagcaatcccgccttgtgcatagacagaattgctgtttttgacgcttttttttgtgataacagtcacttcgtatgagggcgggaaagctgcagctaaggaaagtgccgccgcccctgaaccgatgactgcaatcgtctttttagacatatgccatcctcctgttgtttacacctgtcttgacacctatatttacacaaggataaaataaactcaagagttttttatggagaacggatggaggaagaccggatgatttatttagattatgcagcgacaacgcctatttgtgaggaagcccttactgtatatcagaagcttagtatggatatgtacggaaatgccagcagcctgcatgatgcaggaggaaaagcaaagcacatactggagtactgccgtgaaaaaatcgccaacatcattggcggagaagcaagcggcatctattttacaagcggcggcactgaatccaattttctggccattcaatcattgttaaacggcctgccaaaaacgaaaagacattttattacgactgccatggagcatcagtccattcataattgcgctgcttttttggaacagcagggatatgatgtaacagtcattgaaccgaatgaatacgggcttattaccgaggaaatattactaacccatatccggccggaaacaggccttgtatctattcagcatgcaaattctgaaaccgggatcattcagcccattcaacacctgtcttcatacctgcacaataaggggattcttcttcattgcgacgctgttcaaacgtttggaaagatcccgatcaatacaaaaaatctgggagtagatgcactctcaatgtccagccataaaatccacggtcctaaaggagtaggggcggtctatatccggccggatgtcccttggaaacccgtttatcctctgactactcacgaatacggattcagagccggcaccgtaaatgttcccgggatcggtgccttcactgccgctgcagaattgatcgtaagcgaaatggaaaaacagatatcccgcaatgaggcattaagaacatactttctagaccaaatccgtattcggtctctccctgtaacccttgcagcagacacttcgaaagcagaatgtcttccgcatattatagggtgtttttttcactcatttgaaggacaatatgttatgttagaatgtaatcggagtaatatttgcatttcaaccggcagcgcttgttctgcaggttaccacggtccgtctgaaacaatgaaagcattaagaaaaaccgaacaagaagctctgcaatttatccgcatctcttttggcaggcatacaacagctgaacagctggaacagttattacatacgtttacagtgctttgggaacaaaagaaaggagaatttgatattgaccgaagaattaaagctaatgggcgccaacaggcgtgaccagcttcttctgtggctgaaggaatctaaatcaccgctgacaggaggagaactcgcaaaaaaagcgaacgtctcaagacaggttattgtacaggatatatcgctcttgaaagcgaaaaatgtaccgattatcgccacaagccaaggatatgtatacatggatgcagccgctcagcagcaccagcaggcagaaagaatcatagcatgtctgcacggtcctgaacggacagaagaggaactgcagctcatcgtcgacgaaggcgttacagtaaaagacgtaaaaatcgagcatcccgtatacggagatttaactgcagccatccaagtaggcacccggaaagaagttagccatttcatcaaaaaaatcaattctacgaatgctgcctacttatcacagctgaccgacggcgtgcacctgcatacactgacagcacctgatgaacatcgcatcgatcaagcctgccaagccctcgaagaagccggcattttaattaaagactaaaaaaagccctctagtgggctttttttataattggtaagactggtatgcacccagaagcctcactttgcagccgagtgcttcaagctcctgcatggcccctggaatcaatacatcatcaaacgctttctcaatatcaataataaagaaataatggcctaatccggttttagtcggacgtgactcaatttttgacaggtttaaatttctccaagaaaatgcagacagcactctatgcagcgccccggactgatcatcctgcggcagcatgaccattaaggtcgttttgggcctagagctcaattttgaattcacttcaaaagatatgttttcatcgggagacaggataacaaatcttgtatgattgtccctataatcctgtatatcccgtttcacgatttttaattcgtatgtagaagctgccatatcattggcaatgaccccgatattcagctcgggatggtcactgacaaactttgctgccgccccggtagaattggcgtattcatatggaacggaaggaaaatgtcgatgaagaaatttatggcattgcgcaatcgcgtgtgaatgtgagtaaattttgtcgagctctttccatgcattctctcttgagggatggacgagcaagtgctggtgaatcggcaacgtcatttcacccacgattggcaaaggctgttcatgtattaaatagtctattgttagattaacagatccttctaaagcattttccaaaggaacaaaagcaaaatcaacttcgcctgcaacggctgcatctatacactccggaatggtgcggtaagcaacatgttcggcgccgttttgaaaacaagaactgactgctagatgtgtaaatgtagctgctggacctaaataaccgactttcatgacgattttctctcccttatgcacctgaacctaatatttcaaccttttctacaaaatcaaacttcctgagcttattcattaatgtatgaatgtcttcttccattgccgacgtactgatagacagtgtcacatttgctctgccttgaagcggaatggtctggtgaatggaaagaacgttgcttccagaatcagctaccgcctgaagaagctgagataacgcacctgacctatcctccaaatgaaagaaaagtgtgataatttgttcttttaccatggtgtagaatggaaaaacagcatccctgtatttataaaacgcacttctacttaaatcgaccttttgaacggcatctgctactgaatctgctttttttcgatcaagcagctttttgacttctaatgtttttctcattgcatcgggcaatacatcttcacggacaagataaaatgtctcctctttcatttgcatcccccctttaaaatagagagcctggcaccaggctctcttttcagccaacattgattaatcaataaattcaaattcaaattccagaagcctgattatatctccatccttggctccgcgttctctgagtgcttcatcaacacccattccgcgcatctgtcttgcaaaccgtttaaccgattcatcacgtgagaaatcagtcatcttgaataaccgctcaaggctgtctcctgaaagcacaaatacaccgtctggatcgcgtgtaatgttaaatggcacttcttcattttccatcgtgtacatgacacggttttgtgtaagctcttcctcgtcatacagcgggaattccggtgtgttctcaagctgattggcaacctcaaacagaagctcacgcagaccttctcttgtcaccgcactgatcgggaataccggataatcatccgtcagcttttctttaaaggcttcgagattttccgcagcctccggcatgtccattttatttgcaacgataatttgcggacgctcagtgagacgcagattgtactcgctcagctcctggttaatcgtaagataatcatcatatggatcacggccttctaagcctgacatgtcaatgacatgaacaataaccctcgtccgttcaatatggcgcaaaaactggtggcccagtccgacgccttggtgtgcgccttcaatcagccctggcaaatcagccatgacaaagctgcgtccgtcatccgtttcaaccatgccgagattcgggacaagcgttgtaaagtgatagtccgcaattttcggttttgcagatgagacaacagacagcaaagtagattttcccacactcgggaacccgacaagtccgacatctgcaagcacttttaattcaagaacaatgtagcgttcttttcccggctcgccgttttctgaaagctgaggcgcgggattagccggtgtagcaaagcggctatttcctcttccgcctcttccgcctcttgcaatgacagcccgctgtccgtgctctgttaaatcagcgatgacctgttttgtatcatcgtctgtcacaacggtgcccggcggaactttaatgaccatatcatcagcatttcgcccgtgctggtttttggacatgccatgctcgccgcgaatcgctttaaagtgttttttgtatctaaaatccatcagggtgcggagaccttcatctacttcaaaaacgacgtctcctccctttcctccgtcaccgccggcagggccgcctttcggcacatatttttcacggcgaaacgcaaccataccgttgccgccgtcgccgccttttacatatactttgacctgatctacaaacataatgtcctccgttctaaaccgttaaaaactccgctagtccaacccaatttcaatcagacattcgtgactcgtgatttcaaaacgcatgatatcaacgtcctcatatccattctgccgaatatcatcaaaagcagatggatcggcaaaggcgccgtgaaaatcaaggtacagaatcagctgtctgtcaggatgatccgtttgaagcgaaaccgttaaatgattttcactctctctgctgactgcttgatcaaacagatgaaacagctttctcatcagtttcgccagcttttgatcataagccgacaaatccttaatttctccgagaacttcatattcaagcgtcatataatgggttttccaattaaacgtaagaaaatcaaacgccaaatgcggtgttttcaggtttgagagctttgattcgtgctttgcgtctataaccatttcttcaatcatttcaaagacacggtcatacttctgtaagcttaagtttcctttaatcagctgcagcttattcatccaatcatgccgggaatggccaagcagatgaatcagttcgtttgttaatgccgtgtcgcttatattttcttcttgattttttgaaacatccttcattttcgcactcccaatcatttaatttcttatttaggagtctgtataagtgtgtattatgaattataacagagaaggctttgttagaaaaacaattgtttttcccagaaatatcatgttccttttttctggctttggttgatttgcagccaggcagaacattttatgtattactgcttggggaacatatccagtgggtttgagatgtttattctcattcttggcggggtctgctcgcacatactctgcatttcattctaggtgtttactccgcatattgcaaaaaaaactccagtcatcatcgaccggagttttttgaatcattattgagctacaggatatacgctcacttttttgcggtcacggccgaaacgttcgaatttaacagttccgtcgattttcgcaaatagagtgtcatctccgccgcggcccacgttttcacctgggtaaatttttgttccgcgttgacggtaaaggatagaaccgcctgttacgaattgaccgtcagcacgtttagcacctaaacgtttagcctcagagtcacgtccgttctttgtagaacctactccttttttagaagcgaaaaactgaagatctaatctaagcatgtagctcacctcctatattatgtttgtggtcacacgcaagttgtctttgtaatcccgttcgattgtctccagcgaaacaatcatgccttcaatcagcagctgagctttttggcgtgcctctggatcaagagattcagggaattcaaaataaaaataacccccgtcctctcctatatcaagaagcggctcgaagcccgcgagcacaatgaccgcgttaacggccccaaacacaacggctgtcactccggcacaaacaagatcttgtccatgttcagcaaaattcgcatggcccgtcatttcaaaagacaatatgcctttatcatgagaccttctgattgttgcctgaatcatgcttacgcgttgattttttcgatcgtcactttagtgtaaggctgacgatgaccttgttttttatgaacgtttttctttggtttgtatctgaaaacagtgatttttttcgcgcggccttgtttttcaactttagccgttactgttgcgccttcaactgtagggttgccgactttcacgttgtctccgccaacaaacaaaacgtcttcaaaagtaactgtttcacctgcttcagcagcaagtttttcgatgtaaacagtttggccttcttcaactttgatttgtttaccgcctgttttaatgattgcgtacattctctgcacctcctattagactaagactcgccagataccagggggctgtaaaagctcttaacacctgtactgagcggttgtagcaatggtgctacatccataacattaaaaaatataccaaaatacaaggcgtttgtcaatcagttttagtagggcagaagcagttcctccatggaagaattcgtccgcttatcggcaaagtaagcgtgcagcacttcattctcgtcaagctggctgagcttttggcctgatttttctataataatcggatgcttacagccacgtttgaactcggccatcacatgatagactttatcctccgcctttactgtcagcggcagaagtttctcaagctccctgttttttccgtaatacctttcgaggagaaatctcacatggatatagtgcctttgccgatattcctcaaacaaggaaacagccagaaagacaaacaaaacccatgcgctgatttgcagaggaatcacgaataaaacccagcacccgagcagcaggcagaagcagagcgacgtttttagattaagccggtgagccttttgaaaaggcagctgtttggaaaacaacaaaaataacagttttcctccatccagcggccagatcggcagtaaattgacaaataagatagaaagattataaaaggtgaagagttcaaaggtatgctgatgaatcactgagacttctgcaagcatccaggcggcaaactgaagccagatgtgctgaagaggtccggcaataatgaccgcaaactcttcctttaacggccgattcccgtgctcttccacttcgaccgttccgccaaacggcagcaaaaaaacacgcttgattctccaagaaaaaaacacagccagagcagcatgccccagctcatgaatcaatacaatcaggagcagacataataatgctttcatatggcctgtgagcaagcccagcgccgcaataatccaaagaaaaggatgcacatggatctttaagataaggtcgagccatttattcaaatgaaatcacctgaatcggatcaataaatttatcgccgtctttcatggcaaaataatagacccctttattatgatcatcaagcttaatcgaaccgagctttttgcctttatccacaaaatcatataaagcaacatccacatctttgagctcgccatagatactataggtgttgtcagcatgctgcaccttaaccgtcagtcccgtttggctgtctttgctgacttcaaccacatagccttcttttacgctatcaatcttatcactgcttgtttcgactttaattccttccccattgtcctgaaaatcctgctgtactttcccggatgcaggcgcgatcagatctttgcctacttcaatctgctgttccttatttttgtgttcaggagccaggaaagcaagcggatttccgaatttggtttcgaaccaatggcttgctgaagcaaattgaaattcagtttcaaaggttttggctacggcgggtttaatctgactgacgggtccaatgtttgttttataggctatagctgaaacgagaacaaggcaggccgacagaagacatttcaggataattgaatctgttttcaccaatgggtgttttccgttgaatgttggcatgttatcttcgtagaccggaagtgttccatgcttttcctgatccgttaccatcacccaggacgggggtttctgcttttcagaaactgtctgagtagagaaacgttttgagccggaaagctgctttcttcttttctctaatcgttttctgatttcatctgctctgtgactcattgccatcatcctttgcattcgttgggtttgtacatcatatgtcttgtccatggcaaatattcggtttagtcaagaacaaagcaggcaaaaacaaaaaaaacctgacacagcatatgctttgtcagattcttctctttgattctatcacattaagatcttactccgaaaaatgacttaatcttagccatcattcctttgttttgctcttcaagcacctgtaaaggaacagattcacctaagatgcggcgggcaatattgcgatatgcaatggaagcgcggtttttagggtccatcgcaatcggttcgccatgattggaagctttaatgacttcatcatcatcagccacgattccgagcaaatcgatcgacagatgctgtacgatttcgtcgatatccatcgtgtcaccgtttttcatcaggtgatttctgattctgttaacaacgagccgcggcggttcaatattttcctcttgctccagcagtcctataatacggtcagcatcacgaacagctgagatttcaggcgtagtgaccacaatcgctttatcagctccggaaacggcatttttgtacccttgctcgattccggcaggacagtctatgatgacatagtcaaattcctgtttgagctcttggaccatgtttttaatttgttcaggagcaacagctgtcttatcgctcgtttgagcagcgggcattaaatagagcagatcatcgaaacgtttgtcttttacgagcgcctgatgcattttgcatctgccctctacaacgtctaccagatcgtaaataattctattttcaagacccattacaacatcaaggttgcgcagtcctatatcagtatctactaagcatacgcgcttccctaaaatggctaaggcggtaccgaggttcgcagatgttgttgtcttacctactccgccttttcccgaagttattacgatagcctcacccaattcacattcctccctcaagccttgttagatcaggtcttaaatgagccaaatgttgaaggcgttcaatgaccatatttccgtctgtatctaaataagcacattccatttcgttccctttttgaatgtggtctggggagcgatttaacacatgattgattcttaattgtgtcggaagcatttcagaggcggcgatgaccgcttgattatttccattgaatccagcatgcgcaattcctttcagtgagcccagaacaaaaatgttccctccggccctgactgttccgccgggattcacgtcaccgatcaggagcaagtcgccttttacctgcagcacttggcctgaacggacaatttttgaaacagaaataatttcggcttcctctcttatctgctgtgcttcttttttagtaatgacttcactgtcaatagaatgaacaaacaaatctttctttgacgcaatcaattcggttagctgttcctcttgctccttatataaaaagcgatttcccagcttaacatgaacgctgattttctggccttttccatcggtatattgttcaattgacagcatattctgaagaccatcgagaagctcatcaaaagaacacgcatcatccagatgcaatgttagtccattctttgttccttttattgttacatattgctgctttttggtcttcacaatattcacctcaacaacatactcatttcgtcaaaaaaagataaaatcctttttactcatctctcaattctttctttagactcataaaaaacaatctaaatggcagaacaagaataagagctgctgcaatatttaataaaattgtcggtataaaccggtcaagcacaaatccgttaaacgtcataatgtctttatgaatcaaagactgaatgccgaatacgtaaaattcgagcagacagacagccagaactgctatcaatatcactacaaatgcgtttgtatgcaacactttaaacgcttttgaagccaaatagcatagccctgcaaaaccaaacatgtaaacgcctaatagacttgtatagttcatgtcatatagaaagccaaaaataaatccgtaaatcatcgcgtgtttttggttgataaaagccgacatgaatatcaatacaagcatcaaaaaacgcggggcgagcacttggtcatctgtaacgaaaggaaaatgcaccaaatctgtaaaaatgctttccgcagaaaaaacaagcatcataacgaaagggagaaggaaacgtttcacgatccttcctcctctgtatcgacagtcggcacgtcacggttaacaacgatcacattatttaaatctgtaaggtcagccgcaggttttacataagcaaccttcgttaatccataggaatctgactcgatatcagtcacttcaccgattgtcagcccttctgggaaaacaccgcctgtccctgatgtttcaataagatcgccttttttcacgtcttgtttatccttacgctcaataattgtcatcttaagacgttttttctctttgtcatatccttcgatcaagccgtagcctttgctgcctttttttccggaaatttttgtcgcgactctgttattgcggtcagtatcgcttaaaagctgaacagcagacgtaaaattgttaagtccggagcttttgatcttgccgattaatgcgcctttttcgtttgtaacggccatatctttcgctacgttttgctgagtccccttgttaatggtgacctgtttcgcccaattatcagggcttctggcgatgaccgttgctaaaatcggcttgtaatctttaatcgatttgacatggccaagctcgtcacgcaaggatttgttttcttcttcaagctcttgaagcttggcttcatattgtgtctgtccgtcaagtttttctcttagacgctcgttttctttgtatgtgttttttaaatcattgatgttctcaaatattcctgcaaaaaattcggcaggcgtatgaaaaatattttgaaatactcccgtcgtatcgccgatcactttctcaggccaggtggtattgcggccgcccttcagcgaaaatccaatcatagccaccaatatgataatacacagaagtaatagcattaaccgcttattcggcatcgtgttacacctcttctattgaactcccgattatctagttttccctttgaaaagatggatgtgctccagtgctttccctgttccgatcgctacacaatcaagcggatcttcggcgataaggaccggcatttttgtttcttcgctgatgactttgtccaaattgcgcaaaagcgctccgccgccggttaacactatacctctgtccatgatatctgctgcaagctcaggcggtgttttttcgagtgtgctcttcactgcttcgacaattgtagatacagtgtcgcgtagagcgttagaaatctcttttcctgtaatttcaattgttttcggcaaacctgtgagcaaatcgcggccgcggatttccatgttgtcggattcttcaggagcttctgcagatccgatttccattttaatcgcttcagccgtacggtcaccgatcatcagattgtacgtttttctgatgtagttgataatcgcgtcatccatctcatcaccggctacacggattgactgagacgttacgatgcctccgagggaaataatcgcaacttctgtcgtaccgcccccgatatcaacaaccatgcttccagtcggttcccaaactggcagattggctccgattgctgcggcaaaaggctcttcaatcggatacgcgtcacgcgctcccgcctgtcttgtcgcatcgataacagcgcgttcttcaacagctgtaatgcctgatgggacacataccattacatatggttttctggcaaacatgcctttattttttatggcctgattgatgtaatatttcatcatcgtcgccgttgtttcataatcagcgataacgccgtctttcatcgggcgaagagccaccacgttgcccggtgtccgtccaatcatatttttcgcatcatttccgacagcgacaatcgatttcgtatccgtctgcaaagcgacaactgacggctctctcacaacaattccttttccttttacaaaaacaagcgtattcgcagttccaagatctataccaaggtctctagcaccaattccaaacatatgtatgtatcttcctttcttaaagcaaaaataccctaaagggaaaaactcataaactctattatagcttaattcgacgaaaaaaaaagtgttacaaatatcctttttcctttaaactcacaaattttttatccccgatcaccaaatggtcaagcagctcgatgccaatcaggtttccgcattcaaacagccgtcttgtcacttcaatatcttccctgctcggcgtcggatctccagaaggatgattatgaacacagataaaggaagcggcagatcgtttaaacgcttctttaaacacctctcgcgggtggacaatagatgaattcaggcttccgataaatacggtgcgtttatggatgacttgattttttgtatttaagtataaacagacaaaatgctcctgggttaaaaagcgcatatcctccatgacaagattagcgccgtcttccggggagcgaataacgaaatgttcttcgttggctaatttatgaatccggcttccaagctcaactgctgccagtatttgaatcgcttttaccataccgattcccgggatgcttgacagctcttcaaccgatgcttccttgagcaggcgcagcccgtcaaatgagcgcagcagccggtttgacaggtccaaaacagattcgtgtttagtccctgtccgcaataatatagccaaaagttcatgattcgctaagttctcggctccgactttcaggagccgttcccttggcttttctttcattgggaaatctttgagttttaatggcagatcgtgtatgaccaagcactccttttctttcccttcccgtttatagaaccgtcatgcccttatatcaaaatggcgaagagctctcattgtttttgatataggaaggcccatgactgaataataatctccgtctattttctttacaaaaagcgcgcctcttccttggatgccgtatgcacctgctttatccatcggctcttttgtttcaatatatgtccaaatctcttcttcactgagggaccaaaacgcaacttctgtcttatcataaaaagtctcgctgtgattttcagcttgaatgctgaccgcggttattactgagtgacttcggcctgaaagcctccgcagcatagaagcagcttcttcttgatcctgcggtttgccaagacattcgccgtcaaggcataccattgtatcagcaccgataacgattgcatgcgggtggagatcagctacagccttagctttttgttttgccaaccattggacgttttcttctggtgaaaagtttcgatttaatttttcttctacttcactgacaataatggagtagggcagctggagaagatcgaggagttctttcctgcgcggagattgtgatgcaagtattagcggttttgtcatgttcgtcatcctttcagggtttgcttaagaaaaaaagatactcgtttatcctaccaaatcacgaggcttgtcacaatttcagaaaaataactttttcatgacaaaataaaaaaagcctgtcactaaaggacgaaggctcagggcactatctcttattttacgacggctaacagctcctgctgagccttccacccggcttcagcacttggatcctctaattcctttaaagcctgcaaaatcgcttttttctctcctgtttctgacgcttttgtttcaccaagcgacttttctattttctctacactcgcttttgtaatgtcttcgtcgagaatcgcctttgctgcaagctccgctgtttccttaaaagaatctgtcatatctgactctattgataaggaaagctccttgcctccccaggcttcaaaatcactgtcgattaaaacctgtcctaactgctgtgagacctccttttcacttgctaagcctgcaataacatacgtatacccgtcatcctttgacagtgacacggcggaatatcctttttcggtcaattgttctgttaacgtttcggcgcccttttcatttgaaaattttccggcttgcacagcgtatgttttgtatgtaccttcagtttgtgccgcttgtttttctgcgcctgaggtttgtttatcagcagaagtatcccctgcttttgccgtttggctgcctaaagaatcctctaaagaggccggtgctgacgcttctttattccccgatatgtttaacgcgaataaccctaatccagtgccaatgacagccgcgaaggcaatcgtcgcggccactctttttaccggtttggcagccccggtctttccttttgcgtaaagctttgtttttttcttttgaaaaggaggaacaactttagggtcctctttaaacaccttgtcctcctcggaatcccaattgaattcatcttcatcagggtgttcctgggatgccgcaacctcttgttctgcctgtcttttttcctcccaatttgaaaatgtcatgcttttattcgcctctgtctcaggcgtctcttgttcgtaaaccgtctcttcttttccattaatcgtcaccttgagggctttttctgcggctttactgttttttttattctttctttttttcaattccgcttcctcccttcatttgcttgaccgttcttgtcggcttttcatgctacacactttagcacaggcaaagaaaaaaagaacaagacttttgtcgccttgtccaaaaaacgttcgtcaaatttttcagcagtcagcccaatgccattttgatataaaaagaaatgatagagtcaccgtataaataggctaaaatgctccctgcggctatagcgggggcgaagggaagcggctgccttttagcgagtctaccagtcagaacagctgccgctccatataatgcacctatcaaaactgaaaagaaaaaggcagctgccagcattttcacaccaagcacaaagccaatcaccgcaaataatttaatatctcctccccctactcccccatgggtgattgcggcaattacagccagaaacaaaaatccggctgccgcacctaacaggcctgcataccaggaatcaagcggagaaatcaatctcgcggccgccaaaaagggaagaaagaaaatcaatattcgatttggaatcagcataaaatgaatatctgtcactgcaacaataatgagaagagagataaacaccacagcgggaaacagttccagcgatatgccaaagcgtattcctgcggcggcaaataaacacgctgtcacaagctctgctgcgggatacataaaagaaatcctatgcccgcagcttttacatttacctttttgaaataggaatgacaggatgggaattaattctgcaggagttaatgttcgccggcaaaacgggcatgatgaacggggcgcaataatagatagatgtaaggggatacggcacccggccgtatagtaaaaagaaccaaggataagcccgaagataaaaagaatggatagcatagacaacacacctttactcattgagttctggtatggattgtagcaaaatggacatcctgagctccaattgggaatattcaattttacacatgaaaaaaacggcagaatctttttttgattctgccggagccggatgcttttatttcaacctttttcgaatgtcagaaataaagtaaagagatccggtaatcagcacaatttcatttgagccctttttactttctatgaatttgattacatcgtctggatcttcactccagcttttattgctgatttcacttgcatcatagagatcttttgcaagggaagcacgcgggaaatcaaaagaagcaaaatgaatcgcatgagcaatggtttccagtcttttaatcatgttctgatacggtttgtcctttaacgcgctaaacaccacagaaatgcgtgaattggcgaaacgctgcttcatcgtttccgccagcttttcaacaccttcttcgttatgcgcaccgtctaaatataccggaggatgttcctgaacaagctctaaccgtcccggccaagcagccttcacaagcccgctccttaacgcttcgtcactgatatgggcgatattctccttattgagccactccgcagccaaaatggacaaagcagcattttgtctttgatgggtgccaatcagagatgtccgaatatcttcatagcatttctcttccgttttgaatgaaaactgttctcctgcaggcagagcctcttcattgaaaataacacatgcatcatgcaatgactggaacggcgcagcatgccgttcggcttcatggcggatgacctgtaaagcttccggctgggtaactgctgtaacgattggaataccttctttaataatgccggccttttctcctgcaatttcttcaatggtgtttcccaaaatgttcatatgatcgtgtccgatgcttgtaatcacagttaagagcggttcaaccacattagtagaatcgaatctaccgcccagacctgtttcaaaaataacaaaatcgaccttatgaaactctgcaaaatataaaaatgcacaagctgtcataatttcaaattctgtcggctgtccgtattccgtttgatcaagggcttcaacgtgcggtttcatttgattgacgagtgctgtccattcctcatctgaaatcggtatcccgtttacgctgatccgttcattaaacgtaataatataaggcgatgtaaatgttccaaccgtatatccggcttcctgcagcatagaacggataaaagcgacagttgatcctttaccgtttgttcctgcgacgtggaacgctcggatttttttttcaggatgtcctaaccgcgccatcagctgtttcattcgaccaagtccgggcttcaccccgaatttcagcctcccgtgaatccagctgcgcgcatcttgatatgcagtaaacaatgataatcccctcttttataagacaaggcggtttctctagaaaccgccccggcttttcattaacccttcagctcagccattcgtttttgaacagcgtcacgcttcgccacataatctttttctttttcacgttcttcatcaattacgtgtgcaggcgcttttttcataaatccttcatttccaagtttcttttggacacgctcaacttcttttgtcagtttatcaaattctttttgcagacgggcaatttcttcatcaatattgattaagccttcaagcggaagaataacctctgctcctgagacaacggccgtcatcgccttatcaacagcctcaatatcggtgccgattttaagcacgctcggattcgtaaagcgttcaacatatgaacggttcgcttcgaggcgggacgctatttcgtctgtgcttgttttaatgtacagttcaacctgcttgctcattggcgtattgacttcactgcggatattgcgcacagaacggatcagctcaacaagaagcttcatgtcagctgccgcttcagtatcggtatgctccggcactactgcaggccattgacttactgtaatcgattccccttggtgaggaaggtgctgccaaatttcctccgttaagaatggcataaacggatggagcagacgcatcgtttgatcaagtacgtaagcaaggatggaacgggtagttttcttagccgcttcgtcttctccataaagcggaagcttcgccatttcaatataccaatcacagaaatcatcccaaataaagttatataaatggcgtcctacttcaccaaattcatatcggtcagcaagctgggtcacgtgctcgatcgtttcatttaatcgcgttaaaatccacttgtcagcgactgacttttcacctgacagatcaagctcatcgtacgtcatgccatccatattcattaatgcaaaacgggaggcgttccaaattttattggcaaaattccaggtcgattccactttttcatagctgaagcgcagatcctggccaggagagcttccagtcgcaaggaaataacgcagagaatcggctccgtacttgtcaatcacatccatcgggtcgacaccgttgccaagagatttactcattttccggccttgctcgtcacggattaagccgtggattaaaacatctttgaacgggcgctcgcctgtaaattcaatgccttggaaaatcatgcgtgatacccagaagaaaatgatatcgtaccctgtcacgagaacatctgtcggatagtagcgtttaaagtcttcagccgttacatcaggccagcccattgtggagaaaggccatagcgcagaactgaaccatgtatccagtacgtctgtatcctgttcccaattttcgctgtcttccggcgcttcaagtccgacatatagctcgcctgtttctttatgataccaggcaggaatacgatggccccaccacaattgacgggagatacaccagtcgcggatattttccatccagtgtaaatacgttttttcgaaacggtcaggcacaaagttgaccttttcttcttttttttgcagctcaatcgctgcatcagcaagcggctgcatgcgcacaaaccattgtgtagaaagataaggctccacaacagccccgcttcgttcactatggccgacagagtgcatatgatcctcgatcttgaagagaactcccgcctcctgtaaatctttcacgagctttttgcggcattcaaaacgatccataccttgatattggagcgcattttcattcatcgtgccatcttcattcatgacaaggatgcgttctaaattgtggcggttgccaagctcgaagtcgttcggatcatgagcaggcgtaattttcacggcacctgaaccaaattccatatcaacatagtcatcaccgacaatcggaatttcacgatttacaatcggcaggatcaccgtttttccgataaggtgtttatagcgctcgtcttcagggtgaacggcaacagctgtatcaccgagcattgtttcaggacgtgtcgtcgcaatttcaattgagcctgaaccgtcagcaagcggatagctcatatgatagaatgcgccttgaacatccttgtaaatcacctcaatgtcggatagggctgtttttgtcgctgggtcccagttaataatatattcgcctctgtagatcaggcctttttcataaagcttaacgaatacttcccttaccgctttgctcaagccttcatccagcgtaaaacgttcacgggaataatctaggccaagacctaatttcgcccactggctgcgaataaagtcagcatattcttccttccacttccacgtttcttcgaggaatttttcacggcctaaatcgtagcgggatttgccttcttcacgaagtttcgcctccactttagcctgtgtcgcgatgccggcgtggtccatgccaggaagccacagcacatcatagccctgcatgcgtttcattcttgttacaatgtcttgcagcgttgtgtcccatgcgtggccaaggtgaagtctccctgttacgtttggcggcgggatgacaacagagtatggctcttttgtctggtcactgcccgcttcaaaaaatttgccttttagccaaaaatcatatcggtctttttcaaccgctgccggatcatatttcgtcggcattgtttgttcattcgtttccatcataaccctccagcatgtttaaaaatggctgagaacgaaaaaagagctcttcatccctgtaaaaggacgaaaagctctttcgcggtaccaccttttttcatgaactcaatcagttcatgcacttataacggataacgggtgtttcccgaatttctctactcttctttcaagaaattatgctcccgggcgaccttccaatcagacaacataagaagcctttcagcaaacggcttctctctctgcatgcgccttttttgtactcttcccgttctaagcaggtgtatttatcagctcattgtatacattatttatgttctttattatagtaaaagtgtttttgattcgtcaatcatcttttccaaaaacaccgctttctatacagatgggcaggcacctattgcccaagtttacatatgatgcttgtaaatgcgtagaggaggatgcaccgtgaagaaacgtttcagctcttattcgctgccgccatgggtaaggcaaattcggcttgtatccgcacaagtgattattcccattacgatttttcaaggaatcagaaccattttctttccgacaacctttgatgttttgctgctcgcaatcctaatctttttagcttgcgcccttcatttagaatggatataaacaaacaagtccgcgccattaagacgtggactcgttttcagcctgaaattttttctcttgttcaatctgatgaattttcatcacaaacggctctatgtttttcatttgccaataagcctttaataattgtgtacattcctctttttcatgctgtcttttcccagtttgataaccgttcagcaccttgtacatggctgccggatatgccatatagctgagaaaaaggctgacttccgcttcacgcaaagggaatgatttcgtatatccataaaaccattcgacgcattccggacaagctttcggaaagcctctgaacatttttgtataaaagccgagcaggtcgttttgcggcggaccgacagatgctctttcgaagtttgtaaaatatccggtcccggcatcattatacagaaaatggtgtatagacaggctgccgtggttcattacaacccttgaaacgtccttttcctttgcggactcataccagtcctccagccgttccagcgcaaagttcaccgcggaaatggtttcagaaaaataggttatggcctggagttcaaagggagaaaggtaccattccttctccgctctatccacaaactgctcatagaaaattttatcttgttcccacttttttttcgtttgcccgtaataacgttcaatctcatcacgtctaacctttagttcctgcgcggttctctcgtgaagacgggctgtttctctaaataaataagcatgtttttgatcccgttcttcctcttggtcaaattggagccaaggcattaaatagtagatatctccgtattgtatgcctgctgagaaaaactcaccgctatttgttctgtaaacgggaacgaatgaacgaaagcctttttcctcaatcgccaccatatgatctgtaaaatgcttgccgcgaccttctttcaattttttcagggcaaatatgccgtagtctgtatacactttccaaacaagaggactgacaggctcaataaattgagcagtcagtccgtattcctgaagaaccgattgggtatcttccatttcattcaccacattttccgatcacttacggtttacgcatggctatttttatattgaggaatatagagaatctgtcctgcttttaattcatcatccaaggctaaagaattcatcctgatcagctgctgggatgtaatttcataccgttcgcataaacgctcgatcgtatcttcctgctgcacaatacaaattttcattctcgaaaactcatccgcttcttttgtaaagagttttgttaaataaagagaattatcactttcctttgtttgaggttccttcgtttcagcagcaggagcaaccctaggaacagcatccgtttccttcctttcagtctcagaagattcaggcagctggaaggattgaaaaggtgtttcttccttaggctcttcagctgatggtgtttttctcacttcaatttcgaagctctcttcctcttgttcttcctcctccagcagcttaggcgctgaataaaaagaatcctcctcttcttgttcaggcaggaaggtacggtatgccggttcaggcaattcttcttgagatgcctcctccgagcttgttttttgattgaaatggaaatgtaaatcggcattgtcattctccatatatacagctgaagctgtttctctgctatcttctatggagagagcggcctctgatacactctccaaagcttcatccggttccgcctcttcttggcaaagcgcaggatcagcctgatccgattgagctgcttcttcattttgagcctcttggcgcagcgcatattcatgattaggagacactgttgtttcctctttttcctttgcaatcacagtctctgaatgaagctcagcttccaaagcaggcgattcttctgctccaacgtgttcacgaagctcagtctccgctggagagtctgcttcttcacgaacatccgctattgcagctgccggctctgccgtttctttttttgctttaacgatctcttgaatctctatttctgaaggatcaggttctggctcagattcttctgtttccgattcagcacgaacctccgtttccggcacagcaagctcttctgactcttcttcctctttcacatcttctctggcctctggttctgaagcaaccgattcaggcggctcagattctgctttttctgtctccagttcttcacggagccccgctttcgagataaaaagttctggcggttcggctggcggttcatgctgaagaactgcttcctctgccgatgatgcacccggttcttctactacactatgtgccggcggctctgaaagctcttcctccctgaatgccgcaggagcttcatataaaggtatctccggctctttgtcttgcgtatcgtccaaaagcccttcgatcgctaaatcagcttgaattgttaaaatgcgcgaatccgtcaattgatagtcaaatgcgtcaataaagacgaagacatcctgtaaatggctcactttatttttcggaatggtaatatccacaggaaaacagtgagtcagttccgcacttccatcctctctctttctgacttgttcaacaaaccgcttatctgtataaatctcttcggtatgtttgttttgatctatgttgtactcacctgtaagttcaagcgatcctatgattgatacataatcatttacttcctgaaccctaatatcaggatctaatgaaatagaaagcagttcagaaacttcctgtcctttttggaaacagatcgattcttctacagaaaattgcaatcgatgattttgcggcaagttcatatcctcctttcatctaatccttaaaattagatgtcactaaaggtgtatgtatgaactggagaaaatatgagtgggagagcacgaaaaaaccggcacaaggagtccttgataccggttttcactcttatctgcggctgatctcagcaaatactttctcagctgcctggattgtgttttcaatatcttcatcagtatgggccgttgagaggaaaagaccttcgaattgtgatggcggaaggaataccccttcatttgccatccctttataatagcttgcgaacagcttcaaatcagatgatttcgctgtttcataattgatgactggttcgtttgtaaagaagaaaccgatcatcgaacctgcacggttaaaggtatgcggaatgccatgagccccggcggtttttgaaattccttcttccagtctgtcgccttttttgatgaaattcttgtaggattcaggtgtcagctgtttcaatgtctctaagccagccgtcatcgcaagcgggttgcctgacaatgtaccagcttgatagatcggaccgcttggagcgatctgctccatgatttctgcctttccgccataagcgccgacaggaagtccgcccccgattacttttcctaaacaagtcagatcaggcgttacgccgaagtagccttgagcgcagttataatcgacccggaagccagtcatcacttcatcaaaaatcagcagggagccgtactgctcagtgatatcacgcagaccctgaaggaaaccttcttgcggcggaacaacacccatatttccggcaactggctctacaatgactcccgcaatgtcttcaccgaattgctggaaagcaagctttacactttctaaatcattgtacggaacggtgatggtgtttttcgcaatgccttcaggcacccccgggctgtcaggcagaccgagagtggcaacacctgaaccagctttaatcaagagagaatcgccgtgtccgtggtagcagccctcaaattttaaaatcttgttgcggcccgtatagccccttgccaaacggagggcactcattgtagcctctgttccggagcttaccattcgtacaatttctacagatggcacacgatcaatgacgagcttagccagttcattttctacttcagtcggagcaccaaagcttgtcccgtattcagccacttttttgaggctttctacgacgcggtcatttgtatgccctaaaattaaaggcccccatgacaagacgtagtcaatatattcattcccgtcaatatcaaagattttcgagccttttccgcgctccataaaaatcgggtccatgtctaccgatttaaatgcgcgaacgggactgttcacaccgcccggcatgagtttttgcgcttctttaaaagccgtttttgatttttcatagcttctcatctgcctcaactcctgtcaactgaataaaattactccgcaagccatttcgctgcgtctttcgcatgatacgtaataatcaggtcggcacccgcgcgcttcatgcttgtcaaaatttccaacacaatttctttttctttgatccagccgttctgcgctgcagccttcaccattgaatactctccgcttacattataagcgacgagcggcaaagtaaactcattttttacgtcacgcatgatatccatataagaaagcgaaggtttgacaatcaaaaagtccgcgccttcctcaacatctgattgtgcttcgcggagtgcctccatacggttggcagggtccatctgatatgttttgcggtctccgaattgcggtgtgctgtttgctgcatcacggaacggaccgtaaaactcacttgaatatttaacagcgtaagacatgatgggaatattgacgaatccttctttatcaagtgcttctctgatcactgtaacaaatccgtccatcatgtttgatggcgcaatgatatccgcacctgctttcgcttggctgacagctgtctgcgccaaaagctccagcgattcatcattgagaatgactccgtctttgacaagtccgcaatggccgtggtctgtatattcgcacaggcacgtgtcagcgacaacaaccatttcagggaagtgttctttaatttctgtgatggctttttggacaattccgtgatcatggtacgcttgtgttccgcaatcatctttttcttccgggatgccgaacacgataacagattgaatgcccagtttgaccagctccgctacttcatccttcaataaatctaatgatacatggtgaacatcaggcattgacggaacagcttttttgccttccagcccttcaacgacaaaaatcggatatataaaatctgatggatgcaaacgtgtttcctttaccatttctctcattgcttttgatgtccgcaggcggcggtgtctattaaatgattgactcatattctctcttcctctcttgacatgctgcacattaactcaagcatgccatctattgtaaatgtatcaggcgtatgcgatgtgatgccgtacgtcagaagggcatcatttgttaaaggcccaatgctgatacaggccgtcccattcgccttccacttttttaattcttctcccaagacatgcataaacgtatgtacggttgatgaactcgtaaatgttacatagtcaaaggaatattgacccgcagcgtctttcaatgcctcaatgccttcttcatccggaatcgtttcgtagagaacccattcctttacttcaaaaccgagcgggacaagctcttgttttatcacatcacgtgacaaattccctttcatcacggtaatggtctcccccggttcagcatgctgcttaagagcgtcagccaattgttcagcaatatactcctgtggcatcacatcaaccgatacgttatgcatttttaaacggcgcgcggttttttcaccgacggctgcaatttttttatgcgcagggagaataagctgattttccttcagataagaaaaaaagaagtctgccccgttcacacttgtaaaaacaagccagcctggcgcggcaagatcctctcttacctgttccgcaacatcattcggcaaagcgcggcgaaacgtaatcaaagaggttaaaaccgctttaccgccaagcgcctccactttttgctgaaatgatgctgcctgtgccttattccgggtgacaagcactgtttttcctttcaacggaaaatcattttccatcctcgtcaagctcccgttttacacgatcaattaaatcttttgctcctttgtcagccataagagcggcacagcgctttcctacttcctccggatcgtttccggtgacggtttctttaaaaatgattttgccgtcaggtgaagcgacaagacctgtcatttcaatttcatcctgtccatttaacacggagtagcccgcgatcggaacctggcagccgccctccatcgcgtttaaaaaagcacgttccgctaagacagtccgttttgtatattcatctgtaaactgagaaaacaacgccaacagctcttcatccgattctcggcactcaatcgccagggctccctgccccacagcaggcaaacagcgctcaggctcaaggaattcggttacgacatcttgcttccaacccattctggaaaggccggcagccgctaaaataattgcgtcataatcctctgtttccagcttttgaagtcttgtatctatattacctctaatccatttaattgtaaggtcagggcgctcaatcaaaagctgcgcgcttcttcttaaactgcttgtgccaatgacagcacctttcttcatttctgaaagctttacgcgattctttgaaataagggcatcacgcgggtcctcccgttcaggaatacagccgatcacaaggccttcaggcaaaacagcaggcatgtccttcatgctgtgcactgccatatcaatctcttcgtttaaaagcgcctgttcaatttctttgacaaaaagcccttttccacccacttttgagagtgtaacatcgacaatccggtcgccctttgtcacgatctctttaatttcaaaagcaaacgaaggattgatttccttcagtttttgaataacccattttgtttgagtcatagcgagtttgctccgtctggaacctactttaatcgttctcatcatttctttcctcccgaatctgcttgggacatcgtttaactgaaccaatggaattgcgacaggcttccaagcaggaaataattgatcatcagcaccagaaaacaagccgtattccacagtgcagcgacctttccttgcagctccttaatcagcctgatataaagataatagctgtacagcagcaggacgacaaacgaaccaagcactttggcgtcaaaccaatacagcgtttctagtgagacatacgcccaaatgacgccgagaatcaaactcagcagcagcatcggaaccccaatgacatttaaaacatacgccatataatcaagcttagataaatcttctattctcaacagccattttccccactttttctttttcagcagatgatattgaaacatatatagcacagaaaaaacgaaagaaagggaaaaagcgccgtatgaaagaatcgccattgtaatatgaatcaccaaaagctcggatacaagctgcccggaaaaagcagctgactgctgctctgtcggtgaaaatgtgtgaatggcgatcatagaaaatcctataacatttgtaaaaaacacgataaagtcaacacgtaaaagctttgtcagtacaagtgacagcgtgacaagcacccaggcataaaaataaagtgcctctgtcacatttaataccggaaaccgccccgtcacccacataaaataggccaaatacacggtttgcagagtccagacaatagaaagcaaccagaaggccatttttccagccttccggttgtgttgaagaaaatctataaaataaaagagtacacttaacgcgtaaatgacgattgtcccctcattaagtcttgccattgcagtatcaatcattcagctttcactcacttacaagtgggctaaagcccgcttttgattcagccttcttaaaagagtggaccttctggctgctttcaacggttttcatcatttgacggcccgcagcttcttcaatatcaaaaatctgcataaacaacgcgagcttttcttcagaatcagcatctgccgcaagctctttcacctttaaaatcggatcacgaagcatttggttaataatacttttggtgtgtttgttcaacagttttttctctcttgtgcttaagtgaggcagcttacgctcaatgctgtccatcgtttctgactggatggcaagcgccttttcgcgcaatgcagaaataacaggcacaacaccaagtgtattcatccattgtttaaattccacaatggtttcttcaattaacagttcaactttttcagctgtttctctccgctctttcatgttcgcttctacaatgccttccagatcgtcgatatcataaagaaaaacaccttcaagatcattcagcgccggatcaagatctctaggcacggcaatgtcgaccataaacagcggacgtcccttgcgaagcttattcgcgttttccatcatctctttggacacgacaaattcacttgcaccggttgaactgattaaaatatcagcctccgcaagcgcgctttcaagctgattcaagcttctcgcttcacctgaaaaacggtctgcaagctccttcgctttcaagtatgttcggttaatgacagtgaccttgccgattccctgtccgtgcaggttttccgcagcaagctcgcccatttttcccgcaccgagaatcaatatgtgcttgcttgaaagatttccgaagatttttttggcaagttcaactgcagcatagcttactgacaccgcatttgagccaatgtctgtttcggcgtgagtccgtttgcccactgtaactgcctgcttaaacagctcattaaaaatagtcccgatcgttttttcttgctgagctgttttaaagctgtcgcgtacctgtccgagaatctgcgtttcgccaatcaccatagaatcaagtccgcaggctacacggaataaatgctcaacagcggcatcgctctcataaaacgttaagaacggtgacagctcttctttgcttaattgaaaccaatcagctaaaaacttttttatataataacggccggtatgaagctggtcgactaccgcataaatttcagtgcggttgcaggttgagacaatgatgttttcaagaatgcttttctcttctttcagctgcaccattgcttctgccagctcattcggctgaaaacttactttttcacgtatctcaataggggcggatttataatctactcccacaacaagtatatgcatcgctctaattacacccccaacacccaatcttaatttataatcattctaacatagaactcattatttataataattataacatagtttctttcacaaaatgtgaacagattttaaaattcttatgctatattagaaaaagcttcagggaaaagaagcattcctattgacaataccaaaaacagcagaaatttactacacatcagctctaaaaaacaagaaggtgatatgcatgaaacaaaaatcaattttattcccttgtctgctgcttgccgcttctgtatatgcatggctagaaagcggccaagccgaactgttttcagggcaggatcaatggcctgttctcctcatgctgttaggcgcagcctttgtatatcaaggaaaaaaagaagccgtcacaccccatttttttatcggtttgcttctcttcgggatcggtttacacttttttgccaagccgaaatgggtatggtggccggatgattttgaaatgctcctctttatgatcggcttctcacttctcgtttcaaccgttcaaaaaaaagaatatgtatatgaagctgtgtcgatgatttgtttttccctgtttttgtactttttcaaacaaattatggcatggcttgagtctgcgcatattccaacagcgcttctgaaggagtattggccgtttgtctttattggaatcagtttattgttattattgataaaacgaaaaaaatctatacgataaataaaaccggtagaggatcctctaccggtttatcattttttgatcgctccccaagcttcgtcttttccctttttcgtttctgaagaaaagaggatcagctcgtcttccggatcaatatttaatgtttgtcggacaaccttcgcgtgtttgtcccatttacctttcgggatcttatccgcctttgtagcgataacaataacaggaatgccgtaatactttaaaaattcatacatctgtacatcatcattagatggcgcatgccgcaaatcaacgatctgcaccacagcttttaattcctcgcgtgtcgtgatataggtttcaatcattctgccccatgcttcacgctcagactttgacactttggcaaaaccgtagcccggcacatccacaaaatgcagctcatcattgataatgtagaaattaagcgtttgtgtttttcccggctttgatgacgttctcgcaagatttttgcgattgattaatgaattgataaaagacgattttcctacgttcgatcttccggccaatgcgatttccggaagccccccttcagggtactgttccggttttactgcactgatcacgatttctgactttgtgactttcatttcttctctcctactaaggcatgttccaaaacctcgtctaagtgggacgccaatataaatgtcagcccctccctgacgctttccggaatatcctctatatctttttcattatctttaggcgcaataatggtcgttaatcccgctctatgtgcgccaagcgctttttcctttaagccgccgatcggcagcacgcgcccgcgaagcgtgatttccccagtcatgccgacttcacgcgaaaccgcccgtcccgttaaagcagaaacaagcgctgttgccatcgtaataccggctgacggaccatcttttggcaccgcaccctctggtacatgtatatgaatatcatacttctcatgaaagtcaggttcaatgccaagttcttctgttttggatcgcacatagctgaatgcagcctgagcagactctctcataacatctccgagctttcctgtcaggattaatttcccttttcccggtgaaagcgatacttcaatcgaaagcgtatctccgccaacggttgtatacgcaagccctgtcactacaccaacttgatcctctgtttcagcttgtccatatctgaaaatgcgttttccgataaaatcttgaaggttcttctcagtaaccgtaattcgttttcgctcttcagcaacaatggcttttgcagctttacggcaaattgcggcaagctggcgttcaaggcttcttacacccgcttctctcgtatagtaacgaataatatcaagaatcgcctgatcacgcagctgaagattgcttttcttcagcccgtgttctttgatttgctttggaagcaagtgatcctttacaatttcaagtttttctatttctgtgtagcctgcgatattaataatttccattctgtctctgagcgggcccgggattgtggccaaattgttcgccgttgcgataaacagcactttggataaatcaaaggtttcttcaatatagtgatcactgaagctgctgttttgctctggatcaagcacttcaagcatagcggatgatgggtctcctctaaaatcagatgacattttgtcaatttcgtctaataagaagaccggattcagcttgcccgcttttttcatcccttgaataatacgtccaggcattgctccgacataggtccgtctgtgtccgcgtatctctgattcatcccgaactcctccgagtgagattctgacgaatttgcgtcccaagctttttgcaattgatttggctaaagacgtttttccgacacctggaggtcctgccaaacagagaatcgggcctttcagggattttgtcagcttctggacagccaaatattctaaaatacgttcttttactttttcaagcccgtggtgctcttcgtccaagagacgtcctgcttctttcaaatcaagcttatcatctgtttcatccgtccacggaagagcaaccagccagtcgatatagttgcggatcacagagctttccgcagaacttgacggaattttttcatatctgttcaattctttaagcgctgtttctttcacatgatcaggcatgcctgcttcttcgattttttccgtcagcgtctgaacttcgccagttttgccttctttatcgccaagctctttttggatcgccttcatttgttcacgcaagtagtattccttctgcgtacgctccatcgaacgtttgacgcgctggccgatttttttctcaatctccagcacttctttttcattattaataaaatcaatgaccttgttcagcctgtctttgacatcagccgtttctaaaatatcctgcttatcctttagtttaaggggcagatgagaagcaacgatgtctgccattctccccggctcttcgatatcagtaaccgcagcgtacgtttcggccgagatttttttagaaatttttatgtactgatcaaagtggtctagcaaagtccgcatcaatgcttcgtcttctgtatcttttgaatcatcttcatgaataagttgaatgtcaaccgacgtgtaatcctcgtgttcattgtatttgacgatatgggcgcgcttgaggccctccaccaacacacgaatcgtaccgttcggaagcttcagcatttgcttaatttttgtataggtgccgacagtgaaaatctcgtcttcaccaggttcgtctatcgaaatatcctgctgagtggctaaaaatatcatatgatcatgcatcattgcctgttcaagagcctgaaccgacttgtcacgtcctacatctaaatgcaaaaccatcgtcgggtacactaataaacctcttaaagggaggagcgggatgctgcgttttaattcttctgccatgtgactgacacctccgtgactttagtatgaaccattataatacaactttttcatccttgtacaataaacggcatggttccattttctataaaacagtctcctcgtagtataccctttctttctgatatgaaaaaggaaaagatgtccttcatgaaaaaaaccctattatcaaaatagggtttaaacggattctttattgatttcgatatgaaacggtttttgttccgttggcggattcaccaaaatttcatcaagcacttcttggaacgtcttcactgcaataatctcgatcccgtcaatctgctttaagatggcctgctgattttcatatgggataatcacctttttcgcaccggactgcttggccgcttttattttcggaatgacgcctccgatgggtttcacaagaccgttcaggctgatttcgcccgtcatcgcaacggtattgtcaataggaattttgtgtatcgccgagaaaatccccgccgccatcgcaatgcctgctgacggcccatcaatcggaatccctcctgggaaattgatgtgaatatcataatcagaaggcttcattcccattgtccggagcacggttaatacattttcaaccgaacccttcgccatgctttttcgcctgatcgattttgattggctgccgatgctttcttcttcagctattcctgtgatgttaattgatcctttatcttgagccgcggttacacttacttcgatttccagaagcgatccgctgttaggcccatagactgcaagcccatttacaatgccaacctgtggttcaacaccgattttttgctcgtgctttggagtaagctgactggagtgaatgacccattcaatatcctcaatcgtaatgtcctttcgattctccgttacagccatccccgctgcgatttgaatcatattgacggcttcccgcccgttccgcgtgtagctggtcaaaagatccagtccttcttcggagatatttttttcaattttatccgctgctgttttggcaaccgttttcagctcgtccttttcaagctcgcggaaaaaaacctccaaacagcgggaccggatagctggcggaatttcgtttggcattctcgtggtcgcgccaatcaagcgaaaatcagccggcagcccattttgaaaaatatcatgaatatgattcggaatttgtgtattttcctcactgtaatacgcactgtctaaaaagacttttctgtcctcaagcaccttcagcattttattcatttgaataggatgcagctcccctatttcatcaataaacagcacaccgccatgggcatgggtgacagctccctgcttcggctgcggaatcccagcctgtcccatcgctccggccccttggtatatcgggtcatggacagagccgatgagcggatcggcaattcctctttcatcaaaacgggctgttgtcgcatcgagttccacaaagacagcctgctctttaaacggtgattgtttatgtttttttgcttcttccaacacaagccgcgcagcagccgttttcccaactcccggtggcccatagacaatcacatgctgaggatttggcccgcataaagccgcctttaatgctttaatgccgtcttcctgtccgacgatatctttaaagcttttggggcggaccttctcagataatggctcggacaagctgatagcgcgcattttccgaagctgctccatttccttctttgattctttatctatcgtgaccttttgtgtcctttgatttttaagcaaattccaaaaatacaaaccgatgatgatcccaaaaaacagctgaataaataacgcgatccctgtccaactcatggtggtccctcctgaaaaacaatttatgtatccaattcattcctctgattgctagtatctcccatagaagacgggaataaacgtttttccggaagagttgcatgcaaaaaaacctcctgagtgttaccactcaggaggtttgtgcttatctttatgcagatgttttatcttggcttacctcagtgccgtcttttaataagaggcgaggaggctctccgtgtgtcacagttgccccggtgattacacatttttcaatgtcatcacgagaaggcagctcaaacatcacatcaagcatgatgccttcaatgatagaacggagtccgcgtgctccagtcttgcgttcaattgcttttttagcaatttcagaaagcgcttcttcttcaaactcaagctcaacgttgtcaagctcaagcattttcttgaattgcttaacaagagcgtttttcggttttgttaagatcgcaaccaatgcttcttcgtcaagcttttcaaggcttgcaataaccggaagacgtccgataaattcaggaattaacccgaaacggagcaaatcttctggaagcacttttgaaagaagatcttctttctcaagatcagcagctttattgtcggcaccgaatccaatcactttttggcctaaacggcgtttgatgatttgttcgataccatcgaaagctccgccgcaaatgaacaaaatatttgttgtgtcaatttgaatgaattcttgatgaggatgcttacgtccaccttgaggcggtacgcttgccactgtaccctcaagaattttaagcaatgcctgctgtacaccctcacctgacacatcacgtgtgatagacgggttttcagattttctagccactttatcgatttcatcaatatagataatgcctttttcggctttttccacatcataatcagcagcttggatgagcttcaagagaatattctctacatcttcacccacgtatccagcttcagtcaaagatgtagcgtccgcaatcgcaaacggcacatttaaaatgcgagccaatgtttgcgccagaagggttttaccgcttcccgtagggccgattaatgaaatattactttttgaaagctcaacatcatcaactttgctgttggagttaatgcgcttatagtggttatacacagcaacagcaagtgatttcttcgcttgatcttggccgatgacatattcattcaaaatttcgcgaatttcctgaggctttggtacgtctttaaattctacttcttcttctgttccgagttcttcctctacaatttcagtgcagagttcgatacattcgtcacatatatatacaccaggtccagctacaagcttacgaacctgatcttgtgtttttccacagaacgagcattttaattgtcctttttcctcgttaaatttaaacattctttcaccccttaatcttgtctcactttttcttttaccggcagagcaaaagaaaatgattcttgaaacgaacgagtatgtattgcattttaccatactttccaaaaagacggtaacaatgtgtttctgacttgcacattctatatgtatgacaaaaaacagccctgcattaactatattgccccaagaaaaagagataactcataattgtacaaaacaaggcacgaatgattcgcgccctgttttattagtactattattatgcaccatattaacggttttctacaagaaaatcaattgctttgcgaacttttaaatcttctttcatcgcgtcagtagaaccgatggcttgtttaatattttcaacaggcatgttgtatgcttcagccatttttgtaagctcagcatcaacttcctcatctgatacttcaaggttttccgctttcgcaatcgcctcaagagtcaggttagattttacgcgtttttcagcatcttctttcatttgctctttaagcgcagcttcatcttggcctgagaattgagtgtaaagctcaaggttcatgccttgcatttgcagacgctgttcgaattctttcagcatgcggtcaagctcagtgtcgaccattgcttgaggcacatcgatttcagcattttcagaagctttcagaacaagctcttcacgcaatttagcgtcagcttcgttttcttttgcttcttctaaacgtttctttgttttttcagttaattcagcaagtgtttccacttcttcatcgatatcttttgcgaattcatcgtcaagctcaggaagctctttcgctttgatttcgtgaattttcactttaaacacagctggtttgcctgcaagatcttcagcgtggtactcctcagggaatgtcacttcaacatccttctcagcacctgcttcaaggccaactaattgatcttcgaagccagggatgaatgaaccagaacctacttctagagagtagttttcagcttttccgccttcgaaagcttcgccgtcaacgaatccttcgaaatcaagaacaactgtgtttccttcttcaacggcgccttcttcttttacaacaagctcagcttgacgctcttgaagggcttttagttcgttttgaacatcttcgtcagttacagttgtgtcgtctttttcaatgcccaggcctttgtattcgccaagcttcacttcaggttttactgttactttcgcagtgaagattaagctttcgcctttttcgattttttcaacatcgatttcaggacggtctacaggctcgattccagcttcttcaaccgctttagggtattctacaggaagaagaatatccaaagcatcttggtaaagagcttctacgccaaagcgctgttcgaataatccgcgaggaattttacctttacggaatccaggaattgaaacttgttttactacttttttaaatgcatcatcaagtgctgttttaaacgtttcagcatcaacttcaaccgttaaaacgccttcgttgccttcttgtttttcccattttacagacatgtgtttccctccaaaaatctattcaggttgtgtcggtcttccattctaaagcaatcattcggcttcgtccaacaaaaacaaagctgccaaagatcagaatcattatgtatagatgttaataatgaactgcaaagcctgtccaaccgtatttcttataacccgttatacacaaatacaaccactatattataacataacacatagcgctttcaactatatggcgcgatttacaaataagaaatttcttcaatatcttttaacattgtgcaagcttcatcgagttctctgtctgtaaattcatacatcatatgaagttcttcgctttcaatttcaatcccgtgcatctcgtaaccgactttatgaagggcagccgcccaaaggtcagccgacagcaatttcggctggaacggatataaaacgtacaaatgtcttctccacaattcttctactgctgcatataaggttggattttcatttccaagtgtctcatctagcaccctgagaacacggtgaagaatcggcgcggcatcaggcggaacaatctctgacggttcaattgtcaacgactcgccaaatttactaatgtgtacaggtttactgtactcatgctcagccaacagcatgacaatcatcgttttgataatcggatgggctgaggggtcttggaggattgttttgagcaatcctgtatactttgctacgttacggtcttttaaggaatgaatgagattcatttgctcctcagggcttgccagcactttctcggtgtcaattgtatcctcatattcttcggcccaagcctcgtcctcacgatccggatcggtcattttccggctgaaatccagcagcttataaaattgctcggcactttctgccggcagctgattttcttccaaaacggcttcaatggtgcttttgacttcttcgtactttttgagctgaattaagatggtcatgtacacctgcaaaaccgtaaaataatggccataaccttctttgagcatcttctcgcacacgctttctgcctcttccagctcgcccagctctaaaaagcagatggccatccctaagtgaagatcggattcagtatcatcatatttcatcgcttctgaaaacagttcaagcgcttcttgatactttttttccttgagtgatgacatccctttttccacaaggcggtctttcagatgaggaaaaggaataatttttgcgtttttcttgtcatgcgtcatacctatattcctttcaggcatttattttgttcaagtgtatcaacacctgtgaacaaaaacaagaaatgaaaggtttcaccaggcaaaaaaagccgccggacaaataccggccgctttttcaggcttgaagccaagagcttctttgtgattcaaattgcttgatttcatcttccagcagcagcgttaatgaaatttcatcatatccgttgatcagcatctctttccaatgcggatcaacttcaaatgaaatttgattgccttcactgtcatgaatcagctgattttcaaggtcaacagtcatttgcaatgactggttttcatactggccgacaagctgtttccaattgtcatatggcatgcggatcggaagcatgccgtttttaaagcagttctgatggaaaatatcagcgaatgacggcgcaatgataattttaaacccataatcatcaagtgcccacggagcgtgttcacgcgatgacccgcagccgaagttttctcctgctattaaaatggaagctccttgataaacaggctggtttaattcaaattcagggttcggttcaccattcgcatcatatctccagtcaaagaatgcaaaacgtccgtagcctgttctttcaatcctcttcaaaaattgcttaggaataatctggtctgtatccacattgatccgatttaatacggctgctttccccgtatgtgatttcaaaggttccatctcgcgcactccttacacaactgttttttcctgataaaactttctgacatcaacgaagtgtccgtgaatggcagccatcgcagccattgccgggctgacgagatgtgttcttgcaccttttccttgtctgccctcgaagttgcggttagaggttgatgcacagcgctctccctcaggaacaacatcattattcatactcaaacacatgctgcagcctgactctctccattcaaatccagcttccaagaaaatctggtcaagcccttctttttcagcctgaagcttcacgctttgggatccgggcacgacgatggcccttacgctgtcagctaccttcttccctttgatcatgtcagcagcctgtcgaaggtcagtcatgcgggaatttgtgcaggaaccgataaatacgtgctccactttaatgtcttcaattttttggtgaggagtcaatcccatatattcataagcacgaatcgcttcttttttatcgtcttctgcagaaaagctttccggcgcaggaacttcagaatcgacaggaagaaccattcccgggttaatgccccatgtcaccataggggaaattttgttgccgtcaaggacgatagatttatcgtaaacagcgcccgggtctgtgcgcagcgccttccattcctctacggccttgtcaaattcttcgccttttggcgtgtacttgcgatttttgcaatattcaaacgtcacctcgtcaggtgcaatcaaacctgctcttgctcctgcttcaattgacatgttacaaacagtcattcgttcatccatcgtcatatttctgaatacttccccagtgtattcaatgacgtagcctgtgccgaatttcacaccgtatttgccgatgacagcaaggatgacatcctttgccgttacccctttttgaagcgttccatctacgcgcacttcaagtgtttttggacgctgctgccaaagtgtctgtgtggaaaggacatgttcaacttcactcgtcccgattccaaatgcaagagcgccgaaagcgccatgtgttgatgtatgactgtcaccgcacacaatcgttttccctggaagcgttaagcctagttcaggtccgacgacatggacaatcccttgatccacactgtgaagatcggcaaggcgcacgccaaattcctcacagtttctttcaagcgccgttacctggcgtttcgcaacttcatcctttatctcaaaacgattgacagtcgggatgttgtggtccattgtcgcaaatgtgttttggggtcttctgacctttcttcccttttgtctcaagccttcaaatgcctgaggagacgtcacctcatgaatgaggtgcaaatcaatatagagaagatccggctttccctcaccatgttttacaatatgctgatcccaaatcttttcgatgattgttcgaggcatcatcttttatttcctccctctacctagagctaagaccgcttaacgtaagctgtcacacattagaaattgtattttcactcatgattgctgccttaacttcctctgtaatggcctgagtgctgctgaactcttcactccgtgccaagtctcttgttctttttccagaagccaagactttgtttaccgcatcttctacagctttcgcttcctcttcaagcccgaaagatgttctcaaaagcattgccgctgacaatatggctgcgaacggatttgccatccctttaccggcaatatcaggcgcggagccatgaacaggttcaaacagatgaaggccagagcttgataggctggctgacgggagcattccgagcgagcctgtaagcatggacgcttcatcgcttaaaatatcaccgaacatattttcagtcaccacgacatcaaattgattcggtgcataaattagctgcatggccgcgttatccacaagcatgtgctcaagcttcacatcaggaaattcttgtgcaacgtcctcagccacttcacgccacagccggcttgattcaagaacattcgctttatctacagaggtcactttgccttttctggctgccgccattttgaagccctctctgatcactcgttcaatttccgttcgcttataaaacagtgtatctactgcttcctgctcaccttcagtgtttacataacgtttgctcggctggccgaaatacaagccgcctgtgagctcacgaacgataacgaaatcaacattatctatatattcttttttcaaaggcgaagcgtcagaaaggctttcaaataccttcacaggccgcaaattcgcaaacaaatcaagctgttttctgatgctgagcagccctttttccggtctcagttccgaaggattttgatcccatttcggtccgccgacagcaccaagcaatatcgcgtctgcatttttacaagcagcaacggtttcctccgggagggggttatgatgttcatcaatagccgcccctccaatcaggccatattcaaattcaaattcatggttaaagcgttcggcaacacttttcagtacgtctgtcgctgattctaatacttcagggccgatcccgtctccgggcaatagagcaatacgtttcttcaagttaaccgttctcctttcttttatgatccgacagctgtgtggtttttcaatccgctcatattcgactggaaaaccaattgacggtttactgcgttcaaataggctttcgctgatgcttctaatacgtcttgcgctatgccccgccctgctgattcttttccgttcaccaaaactcttacatacacctgggcaaatgcatcttcgccttttctattagactgaatgcggtagtctaagagctccacatccttatcgatgcagcgctcaagcgtattgtagattgcttccacgcttccagctccagttgcagcttcctgaataagctgtgcgttttcttgatttttcaaagatagagtagccgtagggacctgacttgttccgtaatgtacttgcagagaaagaaattcatacccaatcttgcgatctgttactttttcttctaaaataagagaaacaagatcctcatcagtgatttcttttttcttctcagtcaactctttgaacatcgtaaagaatttattaatctcttcactgtcaaattggaatcctaaagcagtcagccggtctttaaatgcgtggcgtccggaatgtttacctaggacaagcgcatctgcggttacgccgacaagctccggtgaaataatttcataagtcgatttttcctttaaaaagccgtcctgatggatgcctgattcatgagcaaatgcattatctccaacaaccgctttgttgcgcgggacagccatgcctgtcagtttgcttactaaatcacttgttctcttaatctcgttcagcgtaatacctgtttcgacttggtagaaatcttttctggtatggagggctacggcaatttcctctaatgccgcgtttccggctctttcaccgatcccgttcacagcgcattcgatttgatcagcgccattttcaatcgcagcaagagagtttgcgactgccattcccaaatcatcatgacagtgggctgaaagctttgctttgtgaatgttcggaacgttttctttcatatatttaaagatatttccgtattccgccggggccaggtagccgacagtgtccggaagattgataacactggcgcctgcgtcaatcactttctcgacgatttctgctagaaacggcagttcagtgcggcaggcatcttcagctgaccattgcacaatcggaaaacgttcttttgcgtatttcaccattccaactgctctttcaatgacttgttcacgtgtcattttcagcttgtgcttcaaatgaatgtccgatgtcgcgataaatacatgaattcttggttgagcgccatcctttaacgcttcccaagcagcatcaatatcaccttttacacaacgggccagaccagttactgaacaatttttaatggttcttgcgatttcctgaacagctaaaaagtcacctcgggacgaagcgggaaatcccgcttcaatgatgtctgccccgagtctttcgagctgcttagctatggcaagtttctcctgtgtattcaagttcactccaggggactgttcaccatcacgaagcgtcgtatcgaaaaaattaattttgcgcaacggagaccaccgcttccttcttcttgccttgtttcacaaacggcatcatttcacgaagctttcttcccactacttcgatttgatgttcgttctcgcttgcattgatagcgttgaaacgaggacggtttacttggttttcgacgatccactcttttgcgaatgtaccgttttggatatcttttaatacttctttcatagattcttttactttagcgtccacaacgcgagggcctgatacgaaatctccccactgtgctgtgtcagagattgaatatctcattcctgcaagtccttcttcgtacataaggtctacgattaatttcagctcatgaagacactcgaagtatgcaagttcaggctgataacctgcttcagttaaggtttcaaatccggctttgacaagcgcgcttaatccgccgcaaagaactgcttgctcaccgaacaaatctgtttctgtttcttctttaaatgtcgtttctaatacgcccgctcttgcgccgccgattcctttagcataagcgagggctttgtctcttgcttctccagtcacatcttgatagattgcgaacaatgcaggtacgccagctccttgctcatatgttcttcttaccaagtgtcccgggcctttaggggccactaagaatacatctacatccgccggaggaacaatttgatggaaatgcacgttaaatccatgagcgaatactaatgattttcctgctgtcaattcatctttgatttcagcttcgtatactttttgctgctgctcatccggaagcagaaccatgatgatttcggcttgggctgccgcttcttttactgaaaatactttatgtccgtcttcttgggcttgagtgaaagattttccttgtctaacaccgacgatcacgtctactccgctttctttaaggttcagggcatgtgcgtggccttgcgaaccgtacccgataaccgctactgtttttccagccaatacgttctctttgatatcaccgttataatatacttttaccatttcaatctctcccttgttatgttttatacaatagatattgttttattggatgacgccttttgctgggttcccctcgcaaaagccgttgtacctgttctcgcgatttctttaatgccataaggttttaataactcaataagcgcttcaattttgttagattcacctgtcacctgaacaacgatgctgtctctgctgacatcaacgacagaggctctaaacggttctatgattccattaatctctgttcttgttgaaggtgcggagacaaccttgattaaggccagctccctctggacaatcgattgatttgtgatgtctgtgactttcagcacatcaatctgtttgttgagctgtttcgttaactgttcaacatcattttcaccttcaacatgaacgacgaaggtgattctggaaacgccggctgtttctgtgtgtccaactgtaatgctttcaatgttgtaatgcctttttgtgaatagaccggtgatccggtttaacaccccggagcggttcaccacagtcaatgtgataattcttttcaaggtttcacccccaccatttcatgcagccctttccccggagccaccatcgggaatactttttcttcgctggcaacccgcacgtcaatgacaacaggttctcttgatgttaatgcctcttccagcttttcctttgcttccgcttctgatgaaattctgatgcctttaatgccgtatgcttcggacaatttgacgaagtcaggctgagaagcgaatttagattctgaataacgttcttcatagaaaatttcctgccactgtctgaccattccgagacaagcgttatttaaaatcactaccttgaccggaagatttaattcgcgaataacatcgagttcttgaagcgtcatttggaatccgccgtctccgacaaccgcgacaacagtagcatctttttcggccagctgtgcgccgatcgccgccggaagaccgaatcccatcgttccaagtccgcctgacgtgacccatttatctgctttttggaacggataaaattgcgctgaccacatttgatgctggcctacatccgttgcgacaatggcctctccttttgtaaattgatgaatatattcaatcaatttctgaggtttaaaaccttcttcttcattatctacataccagagcggatactcttctttccattctgcgagctgttttttccattcgcttgaatcgctttgtttgccgtcttgtttgatcagctcctgcaggacaattttgctgtctccgactacaggaatctgtgttttcatgatttttccgatttcagctggatcaatatcgatgtgggctatctttgcgtttctggcaaagtgtttcaggtttcctgtgacacggtcatcaaaacgggcgccgatactgattaatagatcacattcatgaagggccatattggctgtataagtaccgtgcattcccgccatccctaggaaaagcggatggtcagccgggaagcctccgagccccaaaagggtgtgtgccacagggatttgctgctgttcagcataattttttaattcttctgacgcttttccgtgcagtacgcccgcacccgccaggatcaccggttttttcgcactgctcacggcttccacaagcttgcggatctgcaaataattcggctctgttgtcggctggtatcccgggagattcatctcatgatcgtagctgaattctccttcaattgttgctacatctttcggaatatcaatcaatacaggtccgggtcttccagttgttgcaatatggaacgcttctttaatgatgcgcggcagatcttccggctggcgaacctggtagctgtgttttgttactggcatcgtaatccctaaaatgtctgcttcctgaaatgcatcgctcccgattacagaggttgctacctgccctgtaaagacgactaacggcaatgaatcaatcatggcatcagcaaggcctgtaacaaggtttgtcgctcccggccctgacgtggcaatgacgacacccggttttccggagacccttgcgtatccctccgctgcatgaattgctccttgttcgtgacggggaaggatatgtaccaaccctgaattgtatagcttatcgtaaatcggaagcacagccccgcccggataaccgaagatcatttctactttctctttttttaatgattcaatcagcattaatgctccgctcatcgtctgtgtacattcggcagatgctgaatccacctgtacattagtccccattttagttcctccttttggattttcatcctttaaagatcatcttttcattagctagatagctgattattcaataaaaaaagcccttccgcccacaatcagccgcgcagtaactgcgatagctaaaaggggcgaaaaggcttttctttccgcggtaccacccttgtttacggcctgttaatcggccgtctcatggatatttctatccgctttagtaacgagtgaatcaagttcacccggccaagtcctactgtcatttcagactggcactctgaggcgagttcaccttgtaaagcttcgccggttctcagctaacccggttctctgtggaaaactttatcaaggctacttatcctcatctgcgcttttcatattcagccttcggaacggctttccagctgttcaagaaggtcgtttgtttttcatttttttagaatcatactgcgatgattttcgcttgtgaagcttgcatttatcttttgttgaactcatattacgccgctttggacgcagtgtcaacagcattttttaaaattattagacaattttgattaatcaatctatattgtatacgctttcattattggtacaaaaggaattgcaaatgttaaaagtttttataatttttttattaatctatcaagaatacaccagaattatttaattttatataaacatggaagattttataacacgatatggttcgtatatggattgagtctgacagatcatcttgcaatccatttcaatttcggataggcacttctcttgttccctcggcatacattaatgatatcttgcaaagaaaaggtgatacgatgaataaatcatttgcagacatgcaaggatttcctgcgggctttccaagcttccccaactttccgcagcagtactatcctgctgtccctcccttttaccagcaaagccagcagccatttggaggctacggatacggacagccgttcagtcaggcatacagcccgttaaccactccctctggaatgtactcctcattcccatacgcttcaggattttacggacagcaattttcaggtgcaggctttagcggccatggcggcagcttaagtgctccagcgatacatgccggcggattcagcggggcgccaggcgtacacggaggctttagatattaaagaataccacaagggccgaacatctattgcggtccttttattgttttaaaacgacttcacaagtacagtcacattttctgtctttatatttggaaacaggatggaatatgattaagatgaattgaacgatattctgcacaatccgtaagttttcgaggaggaataaaattgcatataaaaatagacgatttaactggacgtcaggtggtttcactggtgaatgagcatttacatagcatgacgcttatgtccccgccagaaagcattcatgccttaggtctagaaaaactaagagggcctgaaataacattttggagcgcatgggaaggtgatgaactagctggctgcggagcgctaaaagaactggacacccggcatggagaaatcaaatcaatgcgaacatctgcatcacatttaagaaaaggcgttgccaaacaagttctccagcacatcattgaagaagccgagaagcgaggctatgagcggttaagcttagaaacgggttcaatggcttcatttgagccggcaagaaaattgtatgaaagcttcggtttccagtattgtgaaccgtttgcagactacggtgaagatccaaacagtgtgtttatgacgaagaaattgtgagacggctttataaggatagataagtgcaggggaaggtctgtcttatctatctttttttatattcacacatttttcacctttatgatacacgccaatgttttcaattttgtttaattcaaagaacagcgggaattacaaacgacatgaacgatatcatgcaaattcataaaggaggagattgatatgaaaagcatagttggtgtatatgaaactccgcaggaaaccatcgcagcgattgaaggcttacttacaaaaggctatgattctgatgacatttctgttgtgacaagccggcgagatacagattatttggagtcacgtacaggaacagaagtcaatcaagctatcgatgcacatcaggacgaatctgaatcttttttcgataaactgaaagattatttcacaatggatgatactgctacacacagcaaagcattatccgacttggatattaaaactgatgaaatagacaagtatcaagaagatttggatgacggaaaacttctggtagccgtcgatacagatgcagatgtaattgctcctattgataacggcaatgccctttcaggcggcttttcaagcacaaatgaattggattatacaacgaaagaagaaaaaacgatgccgctccgggaagaacagctgaaggtcgataaggaagacgttcaaaccggcgaagtagaaataggaaaagaagtgaaaacagaaaaaagagatatggacattccggtgagacatgatgaaatttatgtcgaacgccgtccagtggatgaaaataaaacggacgctgctcccgtcaacgattcggaagagatcagagttccaatcgttgaggaaaagctggaagtgactaaaaaaccggttgtcactgatgaagtggttgtcggcaaacgcactgttgaagaaaatgaacatatttctgaaactgtgaaaaaagaagaacctcgtctgaataaagaaggaaaagttgacggcttggatgatgatccgttaaataacaaatgaaaatcatagaccgacaacaaaaaacctcaaatcctaaatggatttgaggtttttcttttggtacgtcccaggagagattcgaactcccgaccgacggcttagaaggccgttgctctatccagctgagctactgggacacgttttgtttttttgtttttcgctttaactatcagcgacaagatttattatatatgggatgcaataataagtcaacggttttttagaatttttttcatgaggaagaaaattttcttcctcatgacattttcatagtgtgactcgattttgcagatcctcaatttcattgcctgcttggtcgtaaaaacggactgtcgcagcatcattttctaatgtcagtatagcatagctttctgtcctgcgcaccctcggaagccggatgctgcctgggttaatcatcagttttccgcgcagcacttcgcttcccgcgatgtgcgaatgcccgaagcagataacatccgccccgagctcctctgcacgatagtatacgtttaacaaggtctgttttataccgtgaaggtggccgtgtgtgactagtatttttcttgagccggcagtcagaagaagctcgtccttaaaatcgccggcaaaatcgcaattgccttttacaaccgcataaggctccaatgcaggatgcctcgtctcaagctcagagtccccgcaatgaatcatgagatcaacttctgcctcatgccgtttcgcaatggtttggagttcttcttcaagcccatggctgtcactgataatcagcacgttcatgtacaagcttcctccttatgcctccaaaagcttagacagctttttaagcgcgtcagccctatggctgattttatttttttcatcacttgtcagttcagccatcgtcttatctttatctttcacgataaaaattgggtcatagccaaagccatattctcctctcggttcttcagcaatatacccttcaacatggccttcgactgtttttgtttcctctccgggaatactcacggccagtgcgcagcggaaacgggcggtgcgctgttctttttcgatacctttcagctcgctgagcactttttcgatatttgcctggtcgtctttctgttcccctgcatagcgggctgaataaaccccgggtctgccgccaagattatcgatggatagtccggagtcatccgcaatcaccattttgttcactgctttggcaacagcttccgctttcataatggcattttcttcaaatgtatggcctgtttcttcaatttcctctgtgaatccaatttcagctaaagatttgacatcatagcctcttggctcaagaatttctttgaattccttcacttttcccggattatgtgttgcaataattgcttctttcatgatgatcaagcctttctgtctttatttcagttctggcagagaatcacccagcacttctttttgcttgtcaatcagctcttggattcctttttccgcaagacccagaagaccgttcagatcctctctagaaaaagttgcctcttccccggttccctgcaattccacaaaacggccgctgcctgtcatgatgacattcatgtcaacttcagcagaggaatcttcttcataatttaaatctaacaaaattccctgttccttatcaattccaacagagattgcagcaagaaaatcagtgatcggatttgtcttgattgttcctgctttgatcagcttgccaatcgcaatcgccatagcaagaaatgcgcctgtaatggaagctgttctagttcctccatcagcttgaatgacatcacagtcaatccaaatcgtccgttcaccgagcttttccagatctacaacagctcgaagcgcgcggccgatcaggcgttggatctccattgttctgccggaaattttccccttagaagattctctgattgttctttggtttgttgcccgcggcagcatgctgtactctgctgtaatccagcctttccctccgccccgcaaaaacggcggtacgcggtcctcaacagacgcgttgcagattacctttgtatttcccgctgttattagaacagaaccttccggatggctgataaaatccaaatcgaatgtgattggacgcagctcatcgtgttgtcttccgtcatgtctcatgttttacctccgattgtatgtacataaaccatttttgtcccggaattgaataaagaaagaggcagccggaacgctaacctctttcttcctagtatatcaaaaatcccaatttaaaaactacccgtattcacttgagatggtctggagaccggttctgtgagcttttcgcctttttcatttaccagctctgattttccgttcactttaacagagacgctttttacatccggctgctccgttaacgtcagcacaatgctgttcagcacttctgaagaaatcattttcgtcttctcatcggcgctgccgaatatagattgattgaaatccaacgtcacgcgcccgtctttgattttcggtttgctgaccagctttacatcttcactgaagtctgttaacagcccgctcaccttgctcggccctttagccaattcattaatggctgctgtgatgtcgtctttttccgaattgtcgattcgtttggtcaccggcacgtagtattcactgtcttcattttccgccaaatagtagactgtcagcggatgggtagcagtgagatcatttacaccggctgtttccaaattaatgccgtctttgcggcttaaatcatctgagatcggcgtccctcctacaggcatctccttcagttcatgcccgtttattctcagcttcactttatctatcgaactaaattgcgtcagcgtccacgtcacagattgaacgattttctgttcgtcttctttcttataatttttgaactcattagagaaatcagctatcgccgttccatcttttttgatgtcaacgttaacggtggtgtcagccggcaatacagctctgaagccattcggaagaatttcagacacaggcccgccctgtacgaggtattcaagcgcctgcttagccgtgctctcacttttaggaagaggcagcgtttgcgcaacaacatacccgtttttatcaatgagataaagctccctcataacagtagatgaggcttgatccgcttttgcggtatcgcttttttcactttctgtttttttggctgctgttgtatttgaattggcacccgcttcatcgttcacgaatgtaacgtcttgaggcggatcaatttcctcggctgccttatcagattgaaacaaaccgcatccggataaaagcaaggcagaggtgagacaagtggcaccaatgactgcaggtccttttttcagcatacttttccctcctaaggatgtttgtactattatgtatacgagcctctttaggaaatagaccgaagaattccggcaaaacagaaaaaaacccgcaacataccgttgcggggaaaactatcttttaatcggttcttgcagtgagatacattccacatgcccgacttcatggccaaaccaatcgtctgcgatttttgcaaactgatcacgcgcccctgttgtcaggaactgatgatccggggcaatcggagactggttcagcagccctttataagagagaattgtgctgacttcccgggctgtttcatcgccggacgaaataatgtttacgtgctctcccatatatctttgaatggcttcttttaaaatagggtaatgggtgcagcctaaaatcagcgaatcaattgatgtgtcttttaacggatacagcgaggttttaacaatctcgtctgctgttttgtcgagaaacttcccgctttccacaaaaggcacaagcagcgggcaggcaaggttttcaaccttcaaatcagggtttaatgccaaaagcgcttcttcgtatgcattgctcttaatcgtattctctgtgccgatgacaccgatatgctgattatccgtcacttttatcgctgctctcgcaccaggctggatgactccgaccaccggtataccgacgctgcgctggatgtcatccaaagcgatcgctgttgctgtattacaggcgatcacgagcattttgatgtggtggttttcgagtaaataattcgtcagctcccacgtatattgaagcacctcttcttcagggcgcggcccgtaaggacaccgtttcgtatccccgacgtagataatattttctttaggtagctgtctcatgatttccttcgcaacggttaaaccgccaaccccggaatcaatgactcctattggttgttccaacaaaatcgcctcattttctcttcatttcatgctgcagtttcatcaaagatttttcgaagatggctatttcttcatctgtaaacgattcgaacatatcacgcagatattcctgtctttttgtaatgacctcttggataatccgttctccttcaggcagcagatgtatcctgacaacacgtctgtccgccgggtccttgacccgctcaacaagctcatttttttgcatgcggtcgattaagtccgttgtcgtgctgcatgccagatacattttgcccgataattcaccgattgtcatatctcctaattcataaagccattgcaagccgacaaattgcggcggcgtaatcgcatattggttaaggatttctcgtcctttttgcttaatgatcgcggcaatgtggcggagtgacttttcaatatccgcaacatgctccaaaggttttgatgtcatttgtccatccctcactcaaggatctcttacgcacaaaagcgttccgtgtctattttccttcttttttgaagaaaatgcaagactcgcaggagagaaatagaggactttagtcaaacaacatcaagaaataaaatttaatttatgacttgcctacgttttgcacagcattccaaatatggtttcgaatgttccaaacaaacagcaataaccggctccttccaaaagaaggaataccggcaaggattaaagctctagctcacccattctaagaagctcaacaacggcttgcgaacgccctttcacacccaatttctgcatggcatttgaaatatggtttcgaacggttttctcactgataaatagctcgcttgcaatctcctttgttgtcttatcttgaacgagcaattcgaacacttctctttctcttttcgttagcagcggcttcgattgaaattctttctccttcaagtattgtaaccctccttgctaaggtgagagcgaatcagaaacgaatgggttttgatatagtcgagatatcatatgtaagaagggcgcaggaggtgacgtttacaagataattagtttatcgtgtatgaagaagcgtttctttctcctcatccgtccagctgacagccttgccgctttcctttgagacttgaaccatcacgactgccccggtgaagcagggttcgccttcgaggttctctccgagatagtgcaaggtaagagatgaactgccgactgcgcttgttttcacatagatgcgcaactcttcataaggcatgacttggcgcaaataatcgcattgctggcttgccacgactgtcatggtctgtttgttttcactcatcatattcagctttttaaaataagaaatccgcacctcctcaaaatatataaaaggggttacattattcatatgcccaaacatgtctgtctcggaaaatcttacggataccttattgaaaaaagaaaaggatgttttccattcttgaaacggcatatcaatataagcgggaagcttcatcttttttcatctccttattgtttaaaaaaacctctcccatgcggaagaggttttttcttcttatactctgtcgcttccgaagaaattgcggaacgcttgtaagtttgtatctctattcaaggctgcaatcgaagtggtaagcggaatccccttcggacaggattgaacacagttttgcgagttgccgcaatctgcaaggccgccttcatccattaatgcttctaatcgttcagatttattcatggcgcctgtcggatgcgcgttaaacaggcggacttgcgacatcggtgcaggccccatgaacttcgatttgctgttcacattcgggcaagcttcgaggcagacgccgcatgtcatgcattttgataattcatatgcccattgacgacgtttttccggcattctcggccccggtcctaaatcgtacgtaccgtcaatcggtatccacgcttttacttttttcaatgaatcaaacattctgctgcgatcaacctgcaaatcacgaacgactgggaatgttttcattggttttaaacggattggctgttcaagctggtcaataagcgccgtacaagactggcggggttttccgtttataaccattgaacatgcgccgcatacttcctcaagacagttcatatcccatgtgacaggggttgtcttctcacctttgacattaaccggattccggcggatttccatcagagcggaaatgacgttcagattcgggcggtatggaatctcaaattcttcatcataaggcgtgctgtcagctgtatcttgacgtgtgataataaatcgtatggttttttgttcactcatgattatttcgccaccttcttcttcgagtaatcccgtttccgaggcgttatcagtgatacatcgacatcctgatactcaaattccggcgcttcatacgggcttacatgtttagccattgttgttttgagccattcatcatcattacgttcaggataatccggtttataatgggcgccccggctttcattacggttgtatgcgccaagggtaatcaccctcgcaagctgaagcatgttcgagaactggcgtgtgaacatcgctccctggttgctccattttgtcgtgtcattgatgttgatctttttgaagcgctccattaactcctgaattttgtcatccgttttcaaaagcttgtcattatggcggacaaccgttacgttcgccgtcatccactcaccgagctctttgtgaagaacataggcattttcggttccgtccatactcataatatcagcccatttttcttcttctttcttaacgtgagcgtcgaataaagatgaagacatgtcttccgctgaagattctaagccgtttacatatttcaccgcattcggaccggccaccatgcctccgtaaatcgcagacagcagggagttcgctcccaagcggttgccgccgtgcatagaataatcacattccccagccgcaaacagtccagggatatttgtcatttgatcgtaatccacccataaaccgcccatagaataatggaccgccgggaagattttcattggaagcttacgcgggtcgtctcccatgaatttctcataaatctcaatgatgccgccaagcttaatatcaagctctttcggatctttatgagacagatcgagatataccatgttttcaccgttaataccgagcttctggttcacacacacatcaaatatttcgcgtgtcgcaatatcacgcggcaccaggtttccgtatgccggatatttttcctccaggaaataccatggtttgccgtctttatatgtccacacgcgcccgccttcaccacgcgctgattcactcatcagtcttagtttgtcatcgcccggtatggctgtcgggtggatttgaatgaattctccgtttgcataatacgctccctgctgataaacgattgacgcagcagatcctgtattaatcatggagttcgttgattttccaaagatgattcccggtccgcccgtcgccataatgacagcgtctgaacggaaggattcaatttgcatgtttgtcaggttttgtgcaacaattccgcggcaggttctgtcatcatctaaaacagcgccaaggaattcccagccttcgtattttgtgaccagacccgcaacttcgtatctgcgcacttgctcgtccagtgcgtaaagcagctgctgtcccgtcgtcgcaccagcataagcagttctgtggtgctgtgtacccccgaatcggcggaaatcaagcaggccttcaggcgtccggttaaacatgacgcccatccggtctaataagtggatgatcgaaggcgccgcttcacacatcgccttgaccggcggctggttggcaagaaagtctcccccgtataccgtgtcatcaaaatgttcccacggagagtcaccttccccttttgtattgaccgctccgtttatgccgccttgcgcacaaactgaatgagaacgtttgacaggaacgatggaaaacaatttaaccgccattcctgattccgctgctttaattgtcgccatgaggccggcaagacccccgccgactacgataatgcttgattgactcatgatagcccctctccctctagtaatctagtactcttaaacaaatgcaaaaatcgcttttaagcctacgtatgacagtgcaacaaaaataatcagcgtaacgtatgtcgaaattctttgagaacgaggcgttaccgtgatgccccatgtaacagcgaaagaccataaaccgttcgagaagtggaaaattgttgataaaacaccgacaatgtaaaaaccaagcatagccggagagctcaaaatattcgccatcatgtcgaaattgacctcagcacccatttgtgcggcaatgcgggtttcccacacgtgccagctgacgaaaatgagggtgatgataccggttacacgctgcaggacgaatagccagtttctcatgtagctgtattgaccggcgttatttttcgcagtaaacgctatgtacacaccataaactgcatgataaattaatggtaagaagataataaaaatttccaaggcatacctgaaaggcaggctatccataaaatgagcagcgctattgaatgcttcagcgccccttgcggcaaactggttgacgactaaatgctgaataagaaagatgccgaccggtatgacgccaagcaaggaatgcaatcttcgaaaataaaactctctgttcccagacattactttaccccctgtttgataagtgcgaaatgtgctaaatctcttcccccacttctttcaattgtaagcactttattaagatttattgacaatttcattttactcctccctcaaaagggcgtcaagaaaacgcgtacataaattataattttccgaattgattagttgattgaaaaattttattttatcaatatatatttcttgcttaatttttcataagaattacaggatcattctgtaatcctcccccctgtttgagctataatatacgcaggagagaggggagacagatatgaagtctaaatttgaagcatctattgacaacctaaaagaaattgaaatgaacgcttatgcctacgaactaatacgagagatcgttctcccagatatgcttggccaagattactcttccatgatgtattgggcaggaaaacatctcgcccgtaagtttcctcttgaatcatgggaggaatttccggccttctttgaagaagcgggctggggaaccctcaccaacgtaagcgctaaaaaacaggagcttgaatttgaacttgaagggccgatcatttccaaccggcttaagcatcagaaagaaccttgctttcagctggaggctggttttatcgctgaacaaattcaattgatgaatgatcagattgccgaatcatatgaacaagtgaaaaagagagccgataaagtggttctgactgtgaaatgggatatgaaagacccagtgtaatcaaaaaggcggtgactgcatagtcccgcctttttgattgtcattacacagctgaagggtgttttgaaagctcaaatgcatcgtgaagcgactcgactgctttcaccatgtcattttcgcttacgactgttgacactttgatttcagatgtgctgaccattttgattaaaatgtttttttgcgccagtacagcaaacatttcagccgctacaccgggatttgagaccatgccggatccaacaatagatactttagccaatttgctttctgtctcgattttctcaaattccagcgcgtctttatactcttcaagcaccgcaacggtttggtctgcatcttctgttttgacagagaaggaaattccagtcttgtcctcggcctgcgtttggataatgatatccacgtttatgtttcttttggcaagtgttgtaaaaatagtagacaaagttgtcaggccgctagtcagcccgtaaatggttactcttgtgatttgatcttcaaatgcaatgcctctgacaattaaattctgttccatggatgattcctcctcaattaatgttcccgcttcggtttctgtacttgaacgcacttctaacggcacttggtaatttttcgcgaactcaactgctctcggatgaagaacaccggcgcctaaattggcaagctcaagcatttcatcgtatgagatgccctcaagttttctcgctgatttcacatagcgcggatcggttgtaaacacgcctggcacgtctgtgtatatgtcacatttatcagcttttaaagcggcagccaaagcaactgctgttgtatctgaaccgccccggcccaatgtcgtaatttcacaatcctctgtcatgccttggaatcctgcaacaatgacaatttttcctttttcaagctggtctgctaaaaccgaagtgtcgatatctgtaattctggcgtttccgtgaatggcctccgtacggattcccgcctgccagccagtataagacacagcgtcatagcctttttcctgcaatgccattgaaaggagtgaaatcgtgacctgctcgcctgtcgccagcagcatatccatttcgcgtttgctcggctggtcagaaatagcttttgcaaggctgaccaattcgtcagtggattttcccattgctgaaacgacgacaacgacttgatggcctttctgtttttctgcaattgcgcggtttgccgcattttgaattttttcgactgagccgacggaagtgcctccgaatttttgtacaataagacccatgtattaccaccctttacattttggttcgtgcgggtgaggagaaagagcgctttgtccacaataaaaaaagcaatgagaggaatactctcattgcttatcaattaatcatcataaatgattatgaacaacgagatagccctccaagaaaatgatttcttgacagccttacatttattcaatgcacggccagcaaataataccgatggggttttatttgcttcggcgacgctcccctttcagcctttttcacagaatccatctttctccaaaggcatactcttgaagttcgcacctctatcttcaccatataacacgatctaactatgaaattagttcacattttatcagatcttatttaaaaggacaacattatttttgcaatttgtcgtaaaggagctgagccgccgctgcgggaacaccggcttttttgatgtcctcaaggcttgcttccttcatttttttaacggaaccgaaatgctttaacagcattttctttcttttctctccgatacccgggatgtcgtccaaaacggattgaaacgcgctttttccccggatttgcctgtgaaaactgattgcaaaacggtgcacctcgtcctgaatgcgctgcaggaggtaaaattcctggctgtttcgttccagatacgccacctccagcggatcaccgatcagtaaatttgaggttctgtgtttttcatctttcgctaaaccggcgatcgggatatccaagccgagttcattttcaatgacatcccttgctgcgttgatctgcccttttcctccgtcaatgataatcagatcgggcagcggcagattctcacgaagcactctcgtatagcgtcttctgacaacctctctcatagaaccgtaatcatccggccctgtaacagttttgattttatatttgcggtattcctttttgtatggtttgccatcgataaacacaatcatcgcggaaaccgggtttgtcccctgtatatttgagttatcaaacgcttcaattctgtgcggcgtataaatatttaatgcctcacctagtttctgcactgccccgattgaacgctcctcgtcccgttcgattaaagagaatttttctttcaatgcgattttcgcatttttatgggcaagcatgagcagttcttttttcgggccttttttcggctggtgaacgtttgtttccagtagctgctcgatcatagattgatctatgctgtccggaactaaaatctccttcggaaggaagtggttgttttttgaatagaactgcccgatgaacgtgaggaactcttcatctgcttcctgataaagcgggaacatgctgacatcgcgttcaatgagctttccttggcggatgaaaaagacctgcacgcacatccagcccttatcgtacgcgtacgcgaacacatcacggtcgactagatcgttcatcgtcattttttgtttttccatcgttgattcaatatgggcaatttggtcacgaagctcttttgctcgttcaaactcaagattctcagcagcttcatgcattttctcttcaagctcttttttgacctcattatagccgccccttaagaaacgtgtaatgctttcaaccagctctctgttcgtctcttcggaaatatcctttacacacggagcaaggcattggcccagatgatagtaaaggcacactctgtccgggagcttggagcattttctgagaggatacagacggtcgagcagtttttttgtttcccttgctgcctgtacattcggatacggcccgaaatagcgccctttgtcttttttgacattgcgggtgacaatcagccttgggtggcgttcatgggtgagttttatgaaaggataggttttgtcgtctttgagcatgacgttgtatttcggatcatgctttttgatcagattcatttctaaaataagcgcttcaagattggaggacgtcacaatatattcaaaatcctcgatttccgtcacaagcctttgggttttcgcgtcgtgagaaccggtgaagtaggagcgcactctgtttttcagcacttttgctttccctacgtagatcacagtctgctgccggtccttcatgagataacaacccggttgatcaggaaggagggcgagtttttctttcagttgtttgttcatatgttacccttccttatgtttaatcctttatttccagtttaacacgaacgtttgtttttctctatggttcacaattggcgaataaaaaaagcgatccctcaatcggaatcgctctggcatgtaagcagcggaaaattaaagatgtttgtttacaagctcttgaagcgcttcttttggtttgaagccgactgaagtttcaactacttcgccgtcttttaacacaagaagagtcgggatgctcataacgccgtattttccggcagtttcttggttttcgtctacatcgatttttacgattttcagtttgtctcccatttcttgatccaattcttcaagaacaggtgcaatcattttacaaggtccgcaccaaggagcccagaagtctgccagtacgacgccttcgcttgtttcagctgagaaagattgatcagttgcttttacgatagccattattgaattcctccaatgtgaaatgatgatttttagtatagcatctcccattcgttcacgctattttaatgcttacaaattattttttcctgatcacagccggtttactcatttttatatggttgaatgggatatgctctttttttaaaacacaaatctgataatggccccgatcactacaattgccccaataatcattaaaatggtacgaagcataagatcacatctcctcttcactgtcatgtactttaccatgccctgccggagctgttttaaaacctgaaaaagagcgccggcatgaagctccggcgctcttgcgcgattaagaatcagcacgcagcgtaagtaagacgactgacattggcgggagttttactttcagtttgtttttgctgagcgtgtattgtctgaaggattccggtttgacatgatgaggatcgtcaaacgtgttatgcgcattcattttttctgccgtaagaatgactccggaatggtccgctgccttgtgtaggcccctcagctcgatttccgcctctgctttgttttggtgatcgatgttgcaaattgtgatattgatatcgccttcagcttgtttcgacgctgaaatgctgatttgcggaagcgtttcaccgttccattcatagtcggcagacattgtctctgtggctaaaagagaagcgtcctggtgcaccttaaacatattgaatacatggtacgtcggtgtcaaaagcatccgctctccctcagtcaaaatcatcgcttgaagaacatttactgtttgggcgatgttggccatttgcacccggcggcaatgctgatggaaaatgtggaaatgagaagccgccaccagtgcatcacgaatggtgttttgctgatataagaaaccgggattcgtgcctggctcgggatcaaaccacgtgccccattcatcaataatcagcccgacccgctgctccggatcgtaccggtccataatcgtgccgtgtttttgaatcaattcatcgatgtatttggcttttttcatcgtaataaaccattcatcttccgtgaattctgtggctgatcctttgcccttccagaaatcccccggaatcgtgtaataatgaagactcaacccgtccatcaggccagcggcttttttcataagcacgtccgtccaattaaaatcatccacatttgcgccgcctgcaattttataaatgtcattcccgctgtaattgcggacataagtctgaaaacgccggtacagatctgcgtagtattcgggatgcatgttgccgccgcagccccagttttcattgcccacgccgaaatatttcagcttccaaggctcttctcttccattttgctttctccagtctgacatcggcgtgccttcttcaaatgtcatatactcaatccactccgacatttcctgaacggttccgcttccgacattgccgcaaatatatggctcgcattcaagcagctcgcaaagcatcataaattcatgcgttccgaattcatttgattcaattgtaccgccccagtgagtgttcagcattgtcttacggtcaccgacaccgtttgcccaatggtattcgtccgcaaaacacccgcccggccacctaaggacaggaatgtgcagctgtttgagcgcctccagcacgtcctttcgtatcccgttgatattggggatgtctgagtccgttccgacccagatcccctcataaatccctcttcctaaatgctcagcaaaatgaccgtatatatttttgttaatggttccttttgcgatatctgtttgaatcactgcttgatgttcagacatgcctctgatcattcctttcatacggatatgaaaagcaccacagtcaaatatgtgatctgtcgtttgcctgaggagtcagcatgaatgtaagcgcttttaaagtaaccatattatatatgttcgtacatgtcaacgacattttctattgtttttatatttgtacgtatgtatttataaatatgaaaaaacccggacttttaaagtccgggatttcctttatgagtgtatattcagctgtttgaattcctcagttaataacgggacaacttcaaataaatcaccgacgatgccgtaatccgctattttaaagatatcggcttcggggtctttattgatggcgacgatcaccttgctgtttgacatgccggccaaatgctggatggcgccggaaatgccgcatgcaatgtacaaatccggagtaacgactttcccggtctgcccgatttggagagcataatcgcaataatcagcgtcacatgccccgcgagaagccccgactgcggcccctagcacctctgcaagctcctgcagcggctgaaatccttccttgcttttgactcctcggccgcccgcaacgataattttcgcttcggagagatcaacaccgtccgccgtttttttcacgacctcttggataacagtgcggaggtcagtaagagaaacatcaatgctttcgatgctccccgatctgctggtgtctttttctgaagcttgaatgttattggggcgaattgttgcaaagatcatcggatcggttgaaatgacgcgttcaaaagctttccccgagtaaatcggccgtgtgaacacaacattccctccggtaacgcttacatctatagcatcagaaattaagcctgtttgcagacgggcagcaagcttcggtgaaagatccttgcccattgccgtatgcccgaagatgactgaatcaggattttcttgctcgataacacctctcatgacctggctgtacccgtctgccgtgtatgttttcagcttcgggtcctcagcggtaagaactttatctgctccgtaatgaataagctcttgtgcaatgctttgtacattttcaccgatgagaacaccgatgacttccccatctcctgaaatggttcttcctgcagctattgcttcaaaggtgacatttcgcaattccccatcgcgtatttctccaagcacgatcactttttttcccattctaacatccccctgtttctttgaatgtccaagttttaaatgactttagcttcgctgcggagcaatgaaacaagctcttttgcctgttcagcaggctcaccttggagaagcttcccggcttcttttttcggcggcagaaaacgttcaatggttttcagctttggttcagcatcctcttcgtccagatcaagatcatcaagttcaagctcttcaagcggctttttcttagccttcataattcccggaagcgatggatagcgcggctcgtttaagccctgctgagctgtgacaagcaatgggagcgtcgttttgattttttcaacatccccttcgacgtccctttctgcttctgcatcagtgccgttgatttcgagtttggtgatcgtagtgatacacggaatgtccagtagctcggcaagccgaggcgccacttgtcctgatcctccgtcaatggcaacatttccgccgagaatcaaatcaaactcctgatccttcatatagtggtataaaacttgagaaatggaatattggtcgggttcatcaagatcatcttctatgttgattaaaacagcttggtcacaacccatggcaagcgccgtacgcaattctttctccgcttcttcaccgccgaccgtgacagcggtgatcgtgccgccatgcttttccttcagctggatggcttcttctatcgcgtactcatcatatggattaatgatccattccgctccgtcatcctgaatctttcctgtttcaatgacgattttttcttctgtgtcaaacgtccgtttcatcagtacaaatagattcatgatcatatccccttttattcgcctttgaactgaggctttcttttttcgagaaatgcctggatgccttccttggcgtcctctgactcaaatgcttccccaaatcgctttgcttcaagctttaagctgccttcataggaatacaccttgttggaataaagaagttcaagcaaagatgccagcgtttgcgggcttttctctgcaaacttagcggcaagtgcttttgctttttcaatcacttctgcctcatctttcgctccaattgagacaagtccgagatcaagcgcttcttttccggatatcggttctcctgatccgatgagctccagtgctttggctgtaccgacatatctcggaaggcgctgtgtccccgcaaaacctggaatgataccgagattaagctccgggagccccagcttagcatcttctgccgcgattctgatgtgacaggccattgcaagctccagcccgcctccgagagcagcgccgtgaatcgctgcgataatcggttttggaaaactttcgattctctccattaactgctggccgcgctcagcgagcaatgaggaatcctcattgcctttaagcgatgtaaattctttaatatcagcgccggctgagaaaaatcttccctcgccgtgaatgataatgcttcgtacgcctgcatctgtctcacattgatcaagacaggaagacagctcttctaatatccggcttgaaagcgcgtttgccggcggattgtgaatcgtcaagactgccacaaattgatcaaccgcaagtgaaattgcattcataggacagaactcctttacttattgtgaattccggataccaataattctaaaacgctgtttgaaagcgcaacgagatcgtacttttggtcattcatcacccaagttgtcacagtttcgtcaatcgttccaaaaatcatctgccgggcgaggcggacatcgaggccttcttttatttcgcctgattgtataccttccgtcaaaatgccatccaaaatatttaagtagccttttaatatttcgttgattttttggcgcagctccaagttggattggcggagctcaagctgcgtgacaatggcgagattatggtcacccgctaaaagggaaaaatgctttgaaatcacaagcgccaatttctctttcgctgttgctttttctttaatgtcctcttccatccgctcaataaattgacccattttttctttgaaaagagaaattaaaatatcttctttgtttttaaaatagagatagatggtgccgtccgctaccccggcttgtttggcaattttggatacctgtgactggtggtagccgttttctgcaatgacttctactgctgcatcaataatctgcatatactttggccgtttttgcttcaatgttcatcgttccttcctatagaaatgaatgactattcattcataatttcatgataagaaggattttcaggtttgtcaagtttattcataggcgttctctttttttatttgatatgatgattttcggtttcttcttcaagtaaacgccttcttaaaatttttcccaccgccgttttcggcagctcctttctgaactcataggctttgggcaccttatagggagctagacgtgatctcgcaaaagcgtccagttcttctgtatcggcttttgcgcctttctttaatacgacaaatgcttttactgtttctcccctgtaggaatcgggaacgcctgcgacaacaatttcctggatggcttcatgttcataaagcgcttcttctacctcacgcgggtaaatattgtaaccgccggcaatgatgatatccttcttcctgtcagcaatatagaaaaagccttcttcatccatatagcccatgtccccggtgaacagccagccatctctcagcactgcggcggtttcctctggtttattccagtatcctttcatgacttgcggaccttttacaatgatttctccatgctcatacggagcggcaagctcacccgtctcttcagaatagatcgcagcgtccgtactcggccaaggacagccgatactgcccggcttgttttttccccagataaagttggcgtgcgtcactggggatgcctcagacaaaccatagccttccacaagctttccaccagtcaccttttcaaatttctgctttacctccacggggagcgcggctgatccgctaagacagcttttaatggatgacagatcataatgctgcaattcagggtgatgcaaaaggccaatgtaaattgtcggtgcgccaggaaagagcgtcggtttgtgtttgtcgatgattttaagtgtttcgagcggatcaaacttaggaagaagaatcatttcgaagcctagtttaatcgaatagttcatgactgccgtcagtccgtagacatgaaaaaatggaacgatgcccagcactttttcagcgccttctttcacgtcatacatccaagcggcgcacatttcagtatttgccaaaatattttggtgcgtgagcatgaccccttttggagctccggttgttcctccggtatactggaggacagcgatatcatgctcaggatcgatcttcgggattgtcaggagttcagttttttcctgcttcatacaggaagcgaacgtgtgaatgttagctgttttgtcaaagtcgatatgcactttttgtttttgcgtcagcgggtaaagaatatttttcggaaaaggcaaatagtcttttacactggttatcaaaatctggtcgactattgataacgttttcatttttattgccttcgggaaaagcaaatctaaggtgatgattacacttacctgagcatctctaagctggtattcaagctcatgctcggtataaagcggattcgtctgcaccacgatgccaccggcaaacaagacgccataataagaaatcactgtttgcgggcaattgggcagcataacagccactctgtctcctttttgcaggccattgcactgcaaaaaagctgcaagtttaagagcatccgtcagaatgtcatgaaaggtgagtttttttccataaaacgatattgcggttttatcagggaatcgtgcggcggagtctgtcaggatggattgcagggttttattcggcaacggaagctcatgcgggatatcgttgggatactcggcaagccacggcttttgagactgcataaaacctcccctttcgattttagagatccaccttatcattatagcagatggacggcaaaaaaaagaaaaagaaaggtaaatctttctttttctcataatatgaacagatatataagaccaattaacaaaaagattcccgctgcggcgagcagtattttcgcaagcttttccatctattctccgtccccttatattccggctgccaccacaaaagaaagcccgacagaaatgacaaatgaaataaagccgacagcccggttatcattttcgatttcctgatcaattttaaaccgcggagtcaaaaactcaaaaataaagtagctgatcagaagcataacaaacccgtaaacgccccagccgatcatttgcagcagcgaattatgctgggagatggaatgctgaaatacgtttgcgattcccaaaatttttccgccggtcgccattgccaccgcaagatttcctttttgaatctcttcccagtttttataagccgtcaccagctcaaacacagtcaaaaagaggacgaggcagagaaccgcgacactgtaatatgccgcgatttccacaagctcgttttcccaaaaatcactcatggccatactcccttttattttagttcaacaaccgtaacgcctgatcctccctcacctgcttcaccgaaacgggaacttttgacgctgcggtggtttttcagaagatcctgtacgccttttcttaaagcgccggttccttttccgtggatgattgacactcttggatatccggctaacaccgcatcatccaagtatttttcaacccggctgagggcattttcatagcgttcgccgcgaagatcaagttcaagcgatacgtgatagtcctttcctttgaccgctgtaatcattttttctttttttggctccggagctgatttgataaactccagatctttttcttttactttcatctttaaaataccgatttgaacgttccattcattgccgcctgttttttcgagcaatgttcctttttgcccgaaagtgaggactttcacctcgtcgccaggcttaaagtcgcgtttttgcgttttcggcttttccggtttcttggacttttcaaaagcaggcatagcgccttctaaccgtttcttcgcgttaatcagctcgtgatccttgaaggatttgtgttcttcttttatggtgcgcaattcatgaataatgtcctcggcttctttcattgccgcttttactttttcagcagcctgctgttctgcctcttcaagcattttgtcttttttgctgttaagctcgatgatttgctgctgcagctctttatgcagtttttccgcttcttttctgattgattctgtctcagaaagctcttcttccgcacgttttttgctttgttccagcgacgcaatcatcgtatcgacttcgttatgctcggccgtcatttctgacttcgcctgcccgatgatatggtccgggagcccgaggcgttttgaaatttcgaaagcattgcttcgacccggcacaccaattaaaagtttataggtcggtgacagcgtttcgatgtcaaattcaacgctggcattcatgacgccttctctgttatagccgtacgccttcaattccggataatgcgtcgtagctaacactcgtgcattggtgcgatgcacgtcatccaagatgctcatggcgagggccgccccctcctgcggatctgtccctgcaccaagttcatcgaaaagcacaaggctgttttcattgacctgttctaaaatgccgacaatattcaccatatgggatgagaacgtacttaaactttgctcaatcgactgttcatcaccgatatcagcgaatacgtgctcaaatactgccgcttctgacccttcatctgccgggatatgaagacctgactgcgccattaaggttagcaggcctaacgttttaagggtgactgttttccccccggtgtttggccctgtgatgacaatggttgaaaaatcgcggccaagctcgatgtcattggcaacaacctgatcaggcggaagcaatggatggcgggcttttttcaaacggataaagccggtgtcgttcataatcggttttgtcgctttaaccgcttttgcatatctagcttttgcaaaaataaagtcaagcgtctgcagcacttgcaaatctagaaatagctcctctgtatactctgccgttttctctgtcagcacacgcaaaatccgttcaatttcttgcttttctttcactttcgcctgctgaagggaattgttcatatctacaatcgcctgcggttcaatgaatagtgtcgcaccagaggatgaggtgtcgtgcacaattcctccatagctggatctgtactcctgtttgaccgggatcacaaagcggtcattccgaatcgtaacaatcgtatcagacagcattttcgatgcggaagaggaacgcagcatcgactctaaccggtctctgactcttgattcgagtgttctgagctgtgtgcggattcctcttaatgtttccgatgcatgatcaagcacttctccgtgatcatcaatgcaggaattaatgtcccgctctaaatcggacagcgtgataagctgttcagcatgctgatggatcagcggaatgtcgacaccgtcttcagccatttgcgtgataaaatgtttcatttgtttaactgcataaagcaggcctgagatttcagtgaattcagaaggactgagaacgctgccgatttccgcccgtcttaacgctcctctgatatctacaaggccgccaaatggcgcttggcctctcagccggataatgtcagaagcttcgtctacttcatccagctgttttttgatttcgtctatagaagcagaaggcttaagctcgagaagcatttcttttccgagcgatgaagcggcatgcccaataacctgttctttcactttatgaaattcaagagctgataatactttttgctgcacgattgtgtgagcctccttacttaatcgttgcgcttcagaaatgcctctacgtctttaagcgaccgggcattcagaacgtttttcgtttccgtccatcctttgcgcgcggcagtaacgccagttttcatatcgtctaacatctcaatattatgggcatcagtattaatcaccaatgtaaccccttgttcgtttgctttcattaaatgctctgtgcgcagatcaaggcgcgcagggttggcattgagttcaagcgccgtatttgttttcctcgcaagctcaatcagctgatcaatatcgatttcgtaaccggcccgtctgccgataaggcgcccggtcgggtgtgcgataatgtcaacatgcttgtttgtcagtgccgtctcaagccgtttcataatcacgtgttccggctgattaaaactggaatgaatcgatgcaataacgatatccatttccgcaagcacatcgtcatcataatcgagcgtaccgtcaggcaggatatccatctcaacgcctttcaaaatacggaagttttcaaactctgcattcagcgcgtcaatttcttttgcctgctgcttaagtctttctgcagtaagcccgttggcgacctttaaatattgtgagtgatcggtgatcgccatgtattgatagccttttttgatgcaggcttcagccatctctctgatcgaaaatgcgccatcgctccacgttgagtgcatgtggagatcacctttgatttgcccgagctctatcagttcaatgctgtcgctgtaggtttccacttcctgtccgctttcacgaatttccggcggaatcagcggcaggccgaagtgcgcataaaattcacgttcactcggaaatgttttgatctctccggtttcaactgtctcaacgccgtattcactgatccgctcgccgcgttctttggcgatttggcgcatcttaatattgtgatcctttgatcccgtaaaatgatggagtgttgtcggaaactgctcttccgtcacaagacggaaatcgacgcttgtttcatattcaaaggaaaggatgacggacaccttcgtatctccgcttgcgatcacgcttttgatgtttggcagctcaagaagctgctctcttacttcagccggatgatctgtagcaatgatataatccagatccttcaccgtttcccgcgctctgcggagacttccggcacgagaaaatttgatgatatgcgtaaattgagaaagatgctcctcaatttcccgcgcgatccggagggcgtagccgatcgggaaccgttcaggctgttttccggcttccccgagcgcctgtaatattttttcttccgattttttgccgaagcccgcaagaccctggaccttttgctgctcacaggcttccttcagagattctgcatcgtgtacgccgagctctttatacagctttgcgatttttttgccgccgagccccggcagcttcaataaaggcacgagtccttccggcacttctttctgaagcgattcgagcgtgcttgactttccttcatctatatactctttaatgacgctgtacgttccttttccaatgccggacagcgacatcatatcgtccatttctgataagcttcggtcgtcctgttccagagctgccgccgcttttcggaaggcggatactttaaacgggttgtcccctttgagttccatatagactgcaatggtttcaagcagccggataatatcttttttatgcatatcataacccccagacgttcacatatgtttccatcatacttgaaaaaaacttctccggacaagagaagtttttttatgccccgtactgtgtccacagctcttgtaaaagccctgacaagtacggtgtatggttaatgatcacatttgcgagagacgattgccccatcatttgctgcaacgcgtctaccggcagaacggatgcgacatacagcagcacaaatgtaaataaatagacttctagaaaaccgagaacggctcccagcatctggttgatttgtttaatcaccggaatgccggctacaatactcaggaacgagccgatgattctcagtaagattttagcaatgataaataaaacgataaacgcaatcgcattatagtacgctgcttccaaattccccgtaaaaaaagaaagagccggctgtcccgctgaaaaatcgggtgcgggaatccaatgtaaatgcggtgccacgtttttatagaataaagccgcaaaggcaattgataaaataaagctcgtcaagcggataaactgcaggataaaaccgcgttttaaccccagtaaagtccccatcaggagcaagattaagatgatgatatctagcatagttgttcaatccttttctttaagctgacgctccagtttttcacatttctcttgtaatttgacataatcgtgcaccacatttaccgctgtcagcactgcaagtttatttatatcaaggtatggatttttttcattgatttctctcattttatcatcaacaattccggcgacatacctcatatgggctctgctttcttcaccgacaatcgtgaagtgctggccgtaaatgtcaacggttgtttttgtttttttgccgtcagacaacgtttctcctccattccgcgagaatcctagttcttatcataacacgtttattaaatgaatggaaagacgagcctcccgctgttatgatacactggtatatacagcgaaaagtgtaaaaaaaggagattattacgtgtcccattcagtgataaaagtatcgttgtctgctattgaccaaatgaaaatgacgtacagcggttcacttacagcctctgttccgcagggagccgtttttcaggcaaaaccgcccggctgtaccattacagcatatcaatcaggtaaggtcttgtttcaaggaaaaaacgctgcggcagaatccgcgcgctggggaacagcagagcctcaggaaaagaagaaaacggccaaaaagccggctgatccccgctatgcccctccggcagatatcgccggaatgtctgttatcggttctgacgaagtcggaaccggagattactttggcccaatgacggttgtatgcgcgtacgtcgacaaaaccatgcttcctttaatgaaggaactcggtgttaaggattctaaagatttaaaagatccgcaaatcatcgagattgcccgaaacctgattaaaaccattccgtacagcctgctggtgttaaagaatgaaaagtataacagcatgcaggaaaaaggcatgagccaagggaaaatgaaagctttgctgcacaatcaggcgatcacacatttattaagaaaattggatggagtaaagcctgaagccattttgattgaccaattcgctgagccaggcgtctacttcaatcatttaaagggcagagacattgtgaaggagcggacctattttagcacaaaagctgaaggtattcacctggctgtcgccgctgcttcaatcattgcaagatattcatttttaatggaaatggataaactatcacgcgcggcaggaatgacgcttccaaaaggggccggtccgcacgtcgatgaagcggccgccaagctgatcctcaaaaaaggggcatctgcactcagaacctttacaaaactccatttcgccaatacgcaaaaagcgcagcgccttgctgataaaaaacgttcatagaaaaaagcttgcagatttctctgcaagcttttttatcagcctcttaaaacagcttgatatgtgtcttctaacgctttcagcactttgctgtgcgcctttgtcacttcttcttcagtcagtgtttgttcaggattgacatactggagtgagaaagcgactgacttcttgccttcctccatatgctctccttcgtatacgtcaaatacggttacctctttcagaagcttgcccccggcctctttaatgacgctctcgagctgtccgcttgtgacggttttatctgttacaagagcgatatcacgtgtcacagacggatattttggaatcgccgtgtaaacaagcggtgctgtttctgctgcgagcaacgcatgaagatcgagctcaaatacgtatgtttcctttatatccagttctttttccaatgaaggatggacttggccgatgaagccgatcagagaaccattcaataaaatgttcgctgttctgcccggatgcagctgtttgcgttcagactgtacaaattcaatgctgtctaggacgttgagtttgtctaacagcccttccacaattcctttgacaacaaagaaatcaactggtttcttttcaccctgccatagctgcttgcgccataatccggtaacagctcctgctacgcgttctgtttcaacaggttttgtgtcctcttccttcgttaggaaaacggagccaacttcgtacagtgcaactgagtcagtctgcctcgcaagattgtaagaaacagaatcaagcagatttggaacaagactgtgtctgagaatgcttctttcttcactcattggaagcgcaagcacagtattcagtgatttttcaatcgcaaacgctgtcgctttcttctcgtttgtcagtgagtaagtgatggcttgtgataagcctgcgccttcaaggaagcgtctgactttacggcgttttgcctgatatggcgttaatccgcctgtagttcccgctgtctcaggaagcgtagacggaatgttatcgtagccgtacagtcttgccgcttcttcgattaaatcctcttctattgtaatgtcaccgcgccgtgatgggacagtcacaacgagaagatcatccgcttcaccgaccgtaaaaccgagacgtttataaatgctgatcagttcttctttactgatcgtcaggcctagaacgctgctcactttgtcagcagatacgtgaatgttatttgcttcgattgtcaggtgatcttcctcaaccgttccagcaagcacctcaccgccggcatacagatggatcagctgcgcagcccgttctgctgcaagacgtacgcgtgccggatcaattcctttttcaaatcttacgcttgattcacttctcaaaccaaggtctttggaagccttgcgaaccttctgcccgttgaaatacgcagcctcaagcaaaatggttttcgtatcttcctgaacctctgactctgctcctcccatgacaccggcaacggcctgcgctttcgttccgtttgtaatgacaaggtgatcggcagacagcttacgttcttgatcatcaagtgttacgatcatttcattctcagctgcttttcttactacgacttccttagagccaaatctgtcataatcaaacgcatgaagcggctgtccgtattccaacaggacaaaatttgtgatgtcaacgacgttgttgtgcggacgaatgcctgcattcatcagctttgtctgcatccaaagcggtgacggagcaatcgtgacatttttaatgatttttgcagtgtacagcgggttcgcttcttgatcttcaattttgactgaaatgtaatcagacgcttgttctgaagcagccgggtaatccgtttgcggaagctttacctcagtgtctaaaatcgccgcaacctcgtaagcaacaccaagcatgttcatggcatccgcgcggtttggcgttaaacccagctcaagaatcgcatcgtcaagctgtaaagccgctaaggcatcgcttcctgtttcagcgtcattcgggaatacgaaaatgccttctgcatactccttcgccacaagtttgctttcgataccaagctcctgtaaggaacagatcatgccgtttgattcttcaccgcgaagcttggcttttttgattttgaaattgcccggcagcaccgctccgactgttgcaactgcgactttttgtcccttatccacattcggcgcgccgcaaatgatttgtacaggggcttcagctccgatatccacaaggcacttattcagcttatcagcattcgggtgctgctcgcgctccagcacatggccgatgacaacgcctttgatgccttctcctttgtattcaattccttcaacctcaataccggctcttgtaattttttcagcaagaacagccgggtccatgccttttaaatcaacataatcctctaaccatttataagaaacaaacatccttgcatcctcctcttacgcctgtttaaactgcgaaataaatctgacatcgtttgtatagaagtggcggatatcatcaatgccatatttcagcatcgcgatgcgctcaacacccattccgaatgcgaagccctgatattccttcggatcaaagccagccattttaagcacgttcgggtgaaccattccggcaccgaggatttcaatccagcctgttcctttacatactgagcagccgttcccaccgcatttaaagcatgtcacatccacttctactgaaggctcagtaaacgggaagaagcttgggcggagtctgatttcacggtcttgcccgaacatttttttcgcaacaagttcaagcgttccttttaaatcactcatgctgatgtttttgtcaacgacaagcccttcaatttgcataaattggtgagagtgcgtcgcatcatcgttatcacggcgatatactttacccgggcaaatgattttaacgggacctttgccttcatgcttttccatcgtacgtgtttggacaggagaagtttgcgttctcatcaaagtttcctctgtgatgtaaaagctgtcctgcatatcgcgcgctgggtgttctttcggaagattgagcgattcgaagttgtagtaatccgtttcaacctctggcccttcctcgactgtgtagcccataccgataaataaatcttcaatttcttcaatgacaacagtgagcggatggcggccgccgactgcaacagggttccccggcagcgtgacgtcaattgtctgtcctgcaagcttctgtttcatttcctcttcttcaagcttctcgtttttgtcagcaatcgcattggcaatacgctcccttacttcgttcgcgagcgcccccatttttggacgttcctcagcagaaagcttgcccattccgcgcagcacttctgtaatcggccctttttttccgagatattgcacccgaatatcattgacaaccttcaatgagcttgccgcttctacttgttctaaagcttcttgttccagctgttttagcttttcttccattttgcatcctccttttatgtaaacaaaccgtcatatgtctttggaaaataaaaaaaacccgtcccttgtacaagggacgagttgtggccgcggtaccacccttatttcagacagactgatgctgtcgtcagcttcattgacataacggaatcagattccggttcacctttacgcgcagtgtacgcggtcccggcgacaactcaagaggtgaagccaatttccggctgcgttaaaaatgctctcagtcagcggcattttctccctggaaagcagttgatcagaaattgaggtcctctgtcacggtttttgaaatattatgttctattatagagaaatccaacgcttggcgcaacactatcctcgcaagtgatacacgaggatggcagccgcaaccgcaacgtttagtgattcagcctgtccgtaaagcggcacgtacaggttcaaatccgttttttccagcaatgcagcatctacccctgcaccttcatttcctacaatgagcgcaaaggattcagactgaggaatctcctggtaaggcgctccgttttgcagcgccgtgccgtatacttttacgccctctgccttcaattcgtccacatatgaaggcaggtttcttctcacaacaggaatatggaagtgagatccttgagcagatcgcagtgtttttccgttaaaggcgtccgccgtgccgtcaccgagtacaaccgcatccaaaccggccgcatcagccgttcgaatcattgtgccaaggtttcccggatcttgaacagcgtcaatcagcagcaccttgcgtgccgttgccagcttttcttcaggcatatggcacacagcggcaatctgctgcggcgtttcggtttcagtcacagctgaaaacgcatcttcactcagcatatagcactggataccagtctcaagatctgaaggaatcctcgtttcatcctttacaaggatttctttcacaatgcccgggcttttcaacgcctcttcaacgaggtgttctccctctatcagaaatgtatttgtttttgttcgttctttttttgtgtgaagctttttccaatccttcactttttggttttttgccgattctatttgtttcactgtctatgtggcgctcctttttttaacatgatgttattatatcgcaagaacagcacataataaaccaggtgcagggttagaatatacgtattacattttagaaaaaggagcgttttacatggatcttaatttacgtcatgccgtcattgccaatgtcaccggcaataatcaggagcagcttgagcatacaatcgtagatgcgattcaaagcggtgaagaaaaaatgcttccagggctcggcgttttattcgaagtcatttggcagcacgcatccgaaagtgagaaaaacgaaatgctgaaaacgcttgaaggcggattaaaacccgccgaataagacatgaaaccgggtgacagcgcccggtttttttcttatataataaaaacatgatgagggggaacgccatgtttttacagccgttattagcgaaaaaaattattgctgaagttaaaaaaatgtacgaacgtgaagtcattattgtaaacacggacggtcttattatggcaggcacaaacgatgagcgtgtcggacaatttcatgagggagcgcttatctgcgcaaaagaaagacgcagcgtgattattacaaaagaagatgaaacaaggttaaaaggagtgaaagcaggcataaacctccctgtattttttgaccatgatgtgattgccgtcttcgggctgacaggtgagcctgcagagattcagccattcggagaactgcttcgaaaaatgacagaactgttcattaaggaatcgcggcacttagagcaatcccagtggcgtgagagaatgctggagtcctttatgatcgattggctgcaattaaaggagtggtctcccagttttcttgagaaagctcagcttcttggtgttgacctttcttcccggcgccaaatgattcttattcaggggtatgagtggtcacctcatgatattgaacaaatggcacgcagctggaaatcctcgtaccctgcggatttgttcatcaggtggggaaatgaacggattttgattaatcatgaagtgccgcagcatgaacaaagggatcggcttttgcggaaaatccttcacatttgttcgtttgccaataccgcaagcagccaatatacagcagctggcgccggaagggctgtcgcaagctccagcctgacagattcatacgagcaagcggaaaaagcgctggctgtcagccttaagcgaaaaacgcccatatttgaagaggatctgaagcttgatatgtgtctgacggagatcagcccgggaacccgaaacgaatttccgcaaagagtattaggaaaggcgctagagcatcaggaacttatgaatacgatacggactttctttcatcacgatttgtctttgaaacaaaccgctgaagacatgcatatacacatcaatacattgcgttatcgtctggctaaggctgaacagctgacgggattacgttttgaccgtaccgaggacgtcgtcacgatgtacgtcgcactctattttttagatcaagatacaaaatagagagagtttcagtttcattttttgtatgtttctccatggaaggctttgctttttttcttttacaatagattgaaagcgttttttgacagggggatgggtgaaatgatcaccaaggatgtaaaggagcagctgattcaggtctccggaccagaaaactttgatgactcgaatgccggccgtctcgtctattcatatgatgcgacgcctcagtatcagtctatgcctgatgccgtgattgctccgaggaatactgatgaaatatcacgcattttaacaatttgcagcgaacatcgagtgccgatcgttccaagaggatcagggacaaacctgtgcggcggcacgtgcccgactgaaggcggacttgtgcttctctttaagcacatgaaccagattcttgaaattgatgaagaaaatttaactgccacagttcagccgggcgtcattacgttggatatgatccgggcagttgaaagcaaaggtttattttatccgcctgacccgagttctatgaaaatatcaactatcgggggcaacatcaatgaaaattccggcgggctacgcggattaaaatacggtgtcacccgcgactatgttattggactggaggttgttctcgcaaatggtgacatcatccgcaccggcggaaaactcgcaaaggatgtggccggatacgatctcacacgtctttttgtcggctcagaaggaacactcggcattgtgacagaggcaatcgtcaaactcgttccaaagccggaaacaaagaagacgctgcttgccctttatgaaaacatcgatgccgctgctcaaacggtatcggacattattgccgcaaaaattatacccgctacgcttgaatttctcgatcagcctacactattggtgattgaggattatgccaaaatcggacttccgacaagcgcaaaagcagttctgttaattgaacaagacgggccatttgaaactgttgaacgggatatggaaaagattgaggcgatctgcaaaaaaggcgacgccgtatccgttcagaccgcacaaacagaggaggaagcgtttgccctgactgaagcccggcgttctgcactttctgccctagcccgcctcaaaccgacgacgattttagaggatgcgaccgttcctcgctcagaaatcgccaatatggttaaagcgattaatgatattgctgctaaatatgatatttccatctgcacctttggtcatgcgggagacgggaaccttcacccgacatgcacgacagacataagaaataaggatgaaatggaacgtgtcgaacaggcttttgccgagatttttgagaaagcgattgaacttggcgggacgataaccggagagcacggagtcggggaaatgaaagcgccttacttggaaatgaagctgaaaaaagaaggcattgatgcgatgaaagcgttgaaagcggcatttgacccccggaacatattaaatcccggcaaaatgtttgcgaaagatgccagaaaacgtgtggtggcggaaagatgacaacagaaaaagaaatgaaacagatccaaaatgaatttaaagagcgtatggatgaaggagagttattaaattgtatgcgctgcggcttctgtcttccttcctgtccgacctatatcgaatcgggatttcaggaaacacactctccgcgtgggcgcatcgccttaatgaaagccgtagccgacggtatgattgaaccggatgaagatgtcgaacggtcgctgtcactttgcctcggctgccgcgcctgtgagcctgtatgcccgtctggcgtgaaatacgggcagctgcttgaggaagccagagatattatccaccaaaataaaaaacactctcttggtgaacgtgtcatgcgaaagacggcttttcacgagctgtttccgcatcaaaaccgcatgcgctcagctgtaagccttatcggtttgtatcagcgttcaggactgcaaaccgctgtgcgaaaatcaggcatgcttcgggtcctgcctgagcatttgcggacgatggaagctgttcttcctgatgttccaaaaagcaaagacatgaaacatcggccgcgtttcctgccttccattggccccatgaaaaaacgggtcgcctttttttcgggctgcttaatggatacaatgtttttaccgaccaataacgccacattgaagcttttacagctggcaggctgcgacattgtcattccgcctgaacaggcttgctgcggggcgcttcatggacacagcggtgaaaaaaacacagggaaagagctcgcgaaacaaaatatcgctgctttcgaagcattagacgtggatgcagtcattacaaacgcaggaggatgcggagcctttctcactgaatatgatcatttgctgaaggatgaccctgagtggtcggaacgggctgccgcttttgttcaaaagctgaaggatttttcttctgttttggttgaactcgatttccatcaaatggatctagcactcgagacgcctcaggtcgttacctaccaagattcatgtcatctaagaaatgtgatgcatacgtcactcgagccccgccagcttcttaaaagcatcaaaggggcggaattcaaagaaatggagaaagcagacagctgctgcgggtcagcgggaatttacaacatcgtcgaagttgaaatgtctatgaaaatactggacagcaaaatggctgccgtcaaagcaaccgaagcgatcctcattgtaacagcaaatcctggctgcctgctgcagatgaagctcggcattgaacgcgaaggactaagcggtaaagtcagagccgttcacctggctgatttgctattagaagcagccgggcacaaaacatcatgagaaagcccaaaacagacattgttttgggcttttgtgcgttattccatcggactgcaaatttcgatataatgtccatccggatcagcgatataggcgaccgtctgcccccatggtttcactttcggctccccgataatcgatacgccttgttctctcatccttttgatgaccgcttctacattttcagtaacaaacccgatttcaaatgtgtttgaagcagatgtatccggaatgtccagcgccgtgatgtctctggcgctttcccgggtattaagcgccaatatcgtagaccctgtatcaaattcgacatacgtgccgtgttcagcacgaatcggcagtcctaaaatatcccggtaaaaaatgaatagcccgcttgctgtccgatacgtatagaataagatatttcattgatagattcattgccaacccctctcagcattttcaatagtccttctagcccggtatagatgcttccatccttaagctcggatctttccacatctgcgcccattttttcacagccgccacgataatgatgaagcctaacaccagcatgatgatagataatacgccattcaatacactatatcctgctgcttcaggattgagatacacattgcgcaccatccaatagcccgcataattgacagtgacatataaataggcaagcgggataaggcaagtcagaatgtaccggcgtttatcggcgattttcagcacgatcgtcgctccgataatcagccccactgaagccatcagctgattagaaacgccgaagagcgcccaaatggaaccgatatctcctgaatacagcaagtacccccacatcaaacaggcaagcgcgctggcaaatacagagcccggaatccagtctgttttcttcagcggcttatacacctccccgaagaagtcctggatcaaataacgggcgacacgtgtgccggcgtcaatcgctgttaaaataaagaccgcttcaaacataatgacaaattggaaaaagtatgaggccaaatggctgaaaaacggcattccggtaaaaatataagtcatccctaccgcaagcgtgacggctccccctgttcttccttctaagtccaaaccgatttccccgctcaattcaggcaaatgtacgacattcatgccaagcgtacggaaaacctcaggcgtgctgttaatcgcaaagtaatcagcaggctgtaaagcggtcgctgcaatcagcgccatgataccgacaagacactcaacaagcattgcgccaaacgcaaccggcttcatatcactccatttattcagcattttcggtgtcgttcctgagccgacaaaggcatggaacccagagatcgccccgcaggcgatggttattgagatgaacggccagacaggtcctgccagcaccggccctccgccttttacgaattctgtaaacgcagggaacggaatggacggattgacgacaaacacaccaacaatcaaagcgataaaaacaccgattttcataaagctgcttaaataatcacgcggagccagaagcagccaaacgggaagcgcagccgcaaaaaacgcataaacaggaagcgcgattgcaagcgttttcgtatctagcgttaaaaagtcaccgagcgcggtagtctgtacccatggaccgataaagactcctgccattaaaaagagaaagccgaccgttgaagcgagctttaaatttcccgttttcttataaaataagcccacacccatcgcaatcggaatcgtaatccccaccgcaaatgttccccatggattacgttcaagcgcatgcaagacaaccatcgacaggcccgccattgtgatcgtgatgataaacagcatggacagtcctgtacaaaatcctgcaacagggccaagctcatccttcgccacttccgacagcgattttccgtttttgcgcatcgatgcaaacaacaccacaatatcatggacggctcccccaattaccgccccgattaacagccacaataatcccggcaaatagccaaactgcgccgccagaattggtccgaccagcggcccggccgctgcgatcgcggcaaagtggtggccgaacgaaacccatttatttgtaggcacatagtctttcccatcctcaagcgcatgagcaggtgttggcttgtcatcattcactttgagaaccttcaccatcataaatgttccgtataaacgataggcaatagccaaaatacacattgatgctatcacaattgtaaccgcattcattttctcccatccccttttctgtttttcataaatatatcataatttcatggtgaaaagcggtcattttttcctatacaaaaagccggctggaatgggccggctcgtggcagttgaaagacaagccggagagaaatctccggctttgctattcttatgactgttttttcaggcggatcacattccaggaaagcggcgtgaaatgagcagttaagccgttttcgctgacagacgatgatccgttggaatgcggaacgacattttttctgttatgctggtttgttgctttgatatcctgatgctcaagtacgatgtgctctgcgatttggtaggattcaaagcctctgagcgaaatctccgtctccatctgatcctcagccttgtttaccgcaaaaatagtgagtgtttcttcctcttcagagtacacaacagcagcatcaacatatggcacatcagtgaaatcagaacaatcgtacttaggagaagaaataagcggtttcagtgactcgccccttccgtaaacagaagcatgcatgtatggatagaaaatcggctgtctccatgcttctccgcctttttccgtcatgatcggcgcgatgacattaacaagctgtgcaagacacgcaattttcacacggtctgcgtgctgcagcatcgtaatgagcagagagccgactaataaggcatcttcaaaattgtaaatatcctctaaaatcggacgcgcagtgatccacggctcgacttttttatcagcctcatttgagtggtaccagacgttccattcatccagagagagattgatagttttcttgctgcgtgtttttgcttttacatagtcacaggtcgcagcgactgatttgataaaatgatccaaatccatagaacgtgccaagtagtttggcagattgttatcccggtttccgtagtaagtgtgaagagagatatagtcgacatgctcatacgtatgctcaagcaccttcgcttcccaatcgataaaggtcggcataccgctgtttgagctgccgcaggcaacgagttcaattgatgggtcaacccacttcatgacctttgctgtctctgcggcaagccgtccgtattcatcagctgttttgtggccgatctgccatggtccatccatttcgtttcctaagcaccatgttttgatgccatacggctgttcatagccatgcgatcttcttaaatcactccagtaagagcctttcggatggttgcaatattcaacgagattacgggcggcatctatgcctcttgtgccaaggttgacggccatattgacctcagtgttcaccttttttgcccaagataaaaattcatttgttcccacttcattggtttctgtcgtttgccatgccaagtcaagccgtctcgggcggttttcgactggtccgacaccgtcctcccagttgtatccggataaaaagtttccgcccggatagcggatgatgggaacctgtaattctttgatcagcgactggacatcttttctaaatccatcttcatccgcttcagggtgatcaggctcgtatatgccttcatataccgcacgacccatatgttcgataaacgagccataaatccgtttatctacttcaccgattttatattctttgtctacaatcattcgcgcttttttcatcacacgtttcctccttcattaacctttgactccccctaccgtcaggccggagataaagtacttttggaaaaacaagaaaatgataatcaccggcaaaatcgcaaatactgagccggatataagcatgtcgtaattatttccataagggctcagcaagctggacagccctattggaagcgtaaacatttctttcgaccgaagcacaatcagcggccacaagaagttgttccagctgtttaaggactgaaggataatcatcgcaccgaaagccggtttcatcagcggtgccataatcctgaaaaagatgccgaattccgtacagccgtccatccttgcagagtccagcagatctcttggaaggccaagagcatattgcctgaaaaagaaaacagcaacaggtgaaacgataaacggcaatatgacacccgtatatgaatcgatcaagtgcagtccgacagtaagtttaaacagaggaagcatcatcacttccagcggaaccatcataataatcagcacaagaacaaagatgatatttctgcccttaaaatcataaaccgcaagcccgtacccgatcatcgaagaaaaaaacagagtgagcacagtcgtaaaaagtccgagtacaagactgttaaaaaaccatttgaaataaatgctgccgccattaaacagaaatgtgtagttatcaaaactcatcacttttggatcaatatcaagattcagccccacacgcaaaagctcagatgacggctttaatgatcctaaaagcaaacagaaaatcggaaaaagatacaataggctcagcatcataaaaaacagggtcagcgcaattctataaacgctaaactgaggactgtgccgcaacatttatccctcccccttaaacgagcctgacagctttaatgaaatcaggctgacaacaaggatcacaatcaaaagcacaatgccgatggccgctccgtatcccatttcattgtaggcaagtccctgctgatacaaatatccgacaagcgtcagaccaatattacccggggaattattctgccaaaggacgtagctttcctcaaacatcctgaagccgccgatgatgctgatggtcagcacatatacggttacaggcttgagaaacggcagcgtgatgtgcagaaattttttcattgtattcgcgccgtctatatcagcggcttcgtacagctctttcggcacattttgcaaacctgctaaaaagtaaaggatgttgattcccatccatctccatgaagcaagcagcaccatcaaaaacatgccggtatgttcattgttcatccagttctgaggtgaaaagccgagtttaagtaggatggaattggccagagacgtttccatttctccgaagatcagccgaaaaatgatccccgcgacaatggttgaggtcaatgccgggataaataatgctgatttaaatatatttctaaatttgaccagctttgaattcaggaatatggccagaagcaatggaacaggaatcagcacgatcagcgtccaaaaggtgtattccagcgtattccaaagggcggtatagaacgtcgggttgtttagcgctgtataattagacaatccgacaaaggacacctctcccggcaaaattctttggaagctcatgatgaagacactaatgatggggtatagaaaaaatacgagaaaggataaaacgaatggcgctgtaaacagatagggcgccgctttttttgaataaaacagatctcgccagcctgattgtttcgcagctgaaggaacgggatgaaccgttcccgttttcacaggtttcatgagaacctccccgctttcactttttgaatgggattctatttctgtttcagttcacctgccgctctgtccaaggcttgtttaggcgttttttgctgagatttaagcgcgtcgaacaatacgcttctgttgacaaggtctgaagccttggcaaaatcctcatgtaaataaattggattgatttcatccttgatatcgagcagcacagaaaaaatgcctgttccgttttggaagtaatccgtgtatttgtttttctctttcaattccttggagctccaaacatcccagcgaagcgggtcaaagccgagtacgctccagagttttttatttccttcttcagagcccttcgcaaaggccaaaaactcttttgctaactcaacatgcttggattgcttcggtacaacagttgccgtaccgcccaaacctgccgagcggtcgcccccctctttccatgccgggagcggtctgatggcaatcttccctttcagatcaggcatataatcgataaatcttcccatataccaaatcggcatgagaactgaagcagctcctccttggttcataaagccgtagtattcttcactgtgatgcccgccgcccggcgcaggaatcatcgttttatcattgatcatgtcttttaaatattgaagtgtttttacgttggtgtcattattgaggatcagcttgccgtttttatcaaaatagcctgagttttgctgtgaaatcatagataagaacgttgcggaatcatttgtttccaccgttcccatcggcttcccggtcactttgcgcactttctgtccggctttatggtaatcatcccatgttttaatatcgtcaggattgacgccggcttttttcatcacatccatgttataaaacatgaccgttgtccctacatgtgtatcgagtccgtaaagctttccgtttttgctgtacaatgtcagccgcgcctcaacgaatttatcgcgatccttttcaatcagcggagtcaagtcggcaagcggtatgtcagagcccttcaaaaagtttgaaaaacgggccaattcgacatctgcaatatcaggaacgccttctcccgctattagggagatagataagttatcgtgcatttgtccatatggataaacgaccgtattcagcttaattttgcggtcaggatattttttgttccattccttcaccatttccacatagaactgctcatgaagcccgttaaatgtccaaaaggtcagctcagtttcacccgatttgccggatgatttttctgctgaacacccggcaatgactaatgtcagcaacatcatgagcacaagaaaacagacagtcatttttttcatctgcgttaccccttccattcgaggtgcgggctattcatatagaccatggttgatcagcgttttgttttcattgatgattcttaatccggtgcatcggtctcttaaggtgtgcgcgtgtctgaaggcatttttgacggaatcctgcccgacaccgatttcgtcaaaatacgcagggcctccggctgatctcagccaatcagccagcacttctcctctcgggagtgtttgataagccgattggatggcttcccggcggcttggtgaaaattcgttcagcccgtcatcctgagcgagctttctgtatgtgtcagttaataaaacagcggcacagcccacctttgccccatgaagaatctgaggccgttttttctccattaactccatttcaatccaatgtgaaatatgatgctcgccgcctgatgccggtcgggaatgatctaatgccagcatgacaagccccgatacaagtaaagactccatcaaaacccgtatgccagtttccgttttcatcgcaatgtcttctgtgtgttcaatgcaggcagcaagcgcctcctgaacgatcttagctcctgcaggcgaataaggctcaccggcaagatgccgggatatttcccaatctgctaaagacgtgattttaccgagcatgtcaccaaagccagccgccaccattgactgcggtgccgcttttaatagatccagatcagcgaacagcgcagatggggccttcgtttgaatggttgttttcgtgccgtataaaataatcggcgcaccggctgatgtaaaaccgtctacagatggagcagtcggataagaaataaacggcaaatctctttgaaacgccgcaaagcggacgatatcatgaatcgtgcccgaaccgactgcgatcatgacatccgttggttgtttcgtatggatcagcacatgaatgagcgatcgttcatcagctgtcacatctccggcttcattttctggaatgatcaggcactcggcctgaaatccttcttgattcagtcggttttctaaatcaattcctgcaatgcggtgtgtattcgcgtcgcagacaaggacaatatgttgattgttttttcgttttacataatccaaaagcgaatcagctgcttgcttaccgagaacaatttcttcaacttttataggcaacgtcttttctccggcgttttcaaaagcacgctgaacgtcagctgcgatacgattcatatcagaatcccctcctcagccaatttggttacatccttaatagaatccagcacataatccggcgtgtacaaacgctgttcaccctgtttcgcagaaccagttagcactaaggcgcttttcatgccataaagcttccccatcgcaatgtcagattcaatgctgtctcctataatcatgcattcatgtgcggacagccccattgctgtacaggcagcctccgccatcagccatgacggttttccgacaacaagttcagtcttcgcttgtgcagaagtctcaattgccccgatcattccggccacatcaatggcatttccgtcttcgttcggaaaagagcggtctttgtttgtagcgataatacgagcgccgccggcagccgcttgaaaggcttgatttaaatcgtcgtacgtgagcgtttcatgaagggagatcacgagccaatccgcttccttcggttcgctcgcgttctgcacaccggccagcctcagctcgtcaaccaagccttgctccccaagcacccatacctttgaaaaacgataatgttttttcagaaaagccgctgtcacgcttgatgacagaacaatgtcgtttacgtccgtttcaatccccgcgccaagaagtttttttctgcacatggcacgggagatattcccccggttgcttaaaaagacgattttctttcccattctcctaagcgttttgatcgcttctcttgctccttcgatcaactcatttcctctgaatacagtaccgtccaagtcaatcagaatgccagccggtgacacaggcgtatcatgactggccataatacgcatttgctccgtgttttcgataaaaatgcttttcatgcaggactgtattgattggggttacatccttgttcagcataatggagtgataggccatttcggcaaccgtttctaatacaactgcgttatgaatggcatttaaggcgtcagtgccccagcagaacggtccgtgattattcacgagcacacccggcacctgttcgtaattatgatgctgaaaggtttccgctatgacttttcctgtattcagttcgtagtcatgaatgatttcttcatcgtacatttctcgagtacatggaatcgcactgtcaaaataatcagcatgggtcgtgcctaacggagggatgtctctgcccgattgcgcccagcttgtcgcccattgagaatgggtatggacaattcccccgatattcggaaaggctttatatagataaacatgggtaggtgtatctgaagaaggtttaagcgagccttcgacgacctctccatcaaggttcaaaacaaccaagtcatcggctgtcaggtcgctgtattcgactccgctaggtttgatgacaattctttctttttcacggtcaatgccgctgacatttccccacgtaaaggttaccagctgatgctcttgaagcttcaggttggcagccagcacttctttttttaatgtttcaagcatgctccatcaccctttatcaattctttttggcggcagatgaaaattgaagatttttgatcgttttcagacgcttcatgacatggttttcttttccgaaataatgaaccagctctttatattcagcgtacaatttttcataaaccgcggcgttttcggcatttggcgtataagttatatctttcagttttcccatgttcgccgctgcctttttgatatcatcgtagccgcctttttctttgcctgctgcaagcgcgccgaaaatggcagatcctaaggctggggcttgcggtgaaccagagattttaatgtccatgtttgtcacatccgcataaatctgcatgacaaacgggtttttctcagctattccgccggctgcgaacagttcctcaatcggaacaccgctttctttgaatgtttcgataatcatccgggttccgtaagctgtcgcttcaactaacgctctataaatctcttcaggcttcgtcagcagtgtcatgccaagcagcatccctgttaaatctgcatcaacaagagttgaacggtttccattccaccaatctaaagcaagcaagccgctttcaccaggcgcttgatggtttgctttctcactcagcagctcatgaacgccaatgtttttttcctttgcttcctcttgataagctggcgggacacatgttttcacaaaccagtcaaaatgatcgccgacacaggactgcccggcttcatatcccgcatagcccgggagaattccgttgtccacaacgccgcacattcctggaacgatatgcacctcttcaccaagtagaacatggcacgtcgaggttcccataatcatcagcattttccctggctctgtaatgccgaccgccggtaccgaaacatgagcgtccacattggcaaccgcaacagccgttcccgggagaagccctgtcagctttgccattttttcagtcagactgccggctttttctcctactgaatgaatagaacctgacaatttgtcctttgtaatcgttttcattgaaggatttaatttctcaaagaaatcatctgacggataccccgctttttcactccacatcgctttataccctgcggtacaattgcttcgcttgagcgagccgcacagctggtacacgatccagtccgcagcctcgatgatccggtcagccgcttcataaatgtgaggcgcttcctcggcaatttgcatgacctttggaatcatccattctgatgaaatttttcctccgtaccgctgtaaaaaagcctctccttcttcttccgcgatttgattgagccgatcagcatgtttttgggccgcatgatgcttccagagcttcacatagctgtgcggctcctcttcatattcaggcagcatgcataacggctgcccgctgctgtcaataggaaggatcgtacatgccgtgaaatcaattccaatcccgataatgtctttcgggtcaacgcccgtctgttcgagtaaagacggaatggttgtttccaagacttcgaggtaatcagcagggtgctgcagcgcccagtcacgcggcagcttttgacccgtttttggaaggacggtatcaatgacagcatgcctgtattcttttacagcagccgcaagttcctcccctgtttggacatgaacgagcactgctcttcctgataaagttccaaaatcaacccctattgtgtaagccatgtgacatccccctctacttttgaagccggtaaagcgcctcgttccattttaactcgtgtttcagtttatgaattgtcgtatcacgggaaatgagaacactttcgattcccgccatttccgcccaatcaagcatttgctccgctgtcagttcataagacaggcaggtatggtgtgcaccgccggctaaaatccatgcctccgctgctgttttcaatgacggctccggcttccagagaacacgggcaaccggtaaattcggcatgtctttttcaatttcctggccgttgacttcattcagcacaaggcggaaacgcccgccaatatcaacaatgctagcttgaatggcagaaccgctgatgccgttaaataccaaacgcgcagggtcctctttgccgccaatcgaaagcgaatgaacctcgattttcggctgatccaaagcgacagtcggacacacttcaagcatgtgagagcccagaatcatttcatttcccggttcaaaatggtacgtgtaatcttccatgaaggaagttctttttcctttagccatgattttcatcatccgtacaagggccgctgtcttccaatctccttcaccggcaaacccatagcctttctccatcaggcgctgaacggcaagtcccggcagctgtttcattccgtgcagcacttcaaacgatgtcgtaaacgctgtgtatccgccttgctcaagaaaagcggttaatccaagttcaattttcgcctgttctttaatggacgctacctttgcttcgtcacgttttgtttcctcactgatcacatatagtctgtcatactcggcataaagcgtgtcaacctcgtcgtccgtaatgcgatccatcacttcaacgagatccccgatgccatatccgtcaacctgccagccaaattgaatatgcgctcccaccttgtctccgtccgttaccgcgacatgacgcatgttatctccaaatctggcaaccttaatatgtctgctttcatttaatgcagccgccgtatccatccactgggacatttcttttttcacttcttcatcatcccaatagccggcaatgacttttcggctaagccccattctcgagttgatgtaaccgtactctcgatcgccatgcgcggattggttgctgttcataaaatccatgtcaatcgtaccccacgggatatcgcgattatattgggtatgcaaatgcataagcggtttttgataagaggaaaggccttctatccacatttttgcaggggaaaatgtgtgcatccatgtaatgatgccagcacatgtctcactgtactccgcttctcttaacagctctctaatggtttccggtgaagtgacgacgggcttatgagtgattttatatctggaagaaatcccgctgagcccctcacaaatgcttttagcatgctgatctacgagttccagcgtctcttccccgtataggtgctggcttcctgtcacaaaccagaattcataatcctttgtctgaagcatgtaaactgcccctttctcataaaataaaacgctttcaaatacaaaagatacgtactaatgatagaaaataaacctataaataaatatttgtacgaacaattttattatagtaattgactattatactgtcaatcttttcttttaaaaaaagccgggggcagagcccggctttttaattcaataggacggccagcccgagctccaattcaaatcattgatgagaagctttggaatgccgttgtcattggcatcataggcatggcgaacaagaatgtttccgttcacaatatcctggcctccaggtcctttccattggtcattgcccgaatccaaaatggtgcctccgccttcaagcatgctttttccgcttttatcaagataagggcctgtaatgcttttggatcttccgtaagcaattttgtacgtactgtttaccccgtcacagcatttatcaaatgaaaccattaaatagtaatatccattttgatacgtaagagtaggagcttctaaggcacctccattattcggtctagctgcaatcgaatagagcgagcctgtaggcttcattgtactcttatcgagcttagtcagcttaatgccgctccaaaacgagccgaatgcaagccacgggttgccatccttatcgaatgtcagctccggatcaatggcgttataattatttgagcttgtcgaacggatcaccaagccctcgtccttccagccccccgaactgatgcttgttgaagatgccaggccaatggcagatgtattgcttccaaaagaagaaacggaataatatagccagtacttgccgttatagtattggatgtccggcgcccactggttttggccataattcggcacataattggaccaccacgatagcggtgtagtgaaaatggatttttgtacggtccaatttttagcgtctgaagacttcaaaacccgcagtccccgttcttcagtaagccctgttccgagcgcataccatgagctcccctctttaatcatagtcgggtcatgaagcagctcattggatgcaccccaaaacgctgcctctgcgggagcagcagaagtgaatatcaaacctgcagccagagctgcactcgaaaagtgtaagaagcgtttccatgtttttttctttttcaattttgttcaacctcctttattttagaaagcgcttacaaattagattatttatcctcccttcctgtcaaatcgactgcgtatcgtatatcgtcatgttcaggaaattttcggtatcccctttattgtagtcactatgctgtaatttgtacagacaaaaaaatagaatccacctcaataggcggattcttccgtatctttattggtacgtaatttcgtcaaccgtttttcggtctaacttcttaatgacttctgtaattaactttaccgcgttttcataatcatcacgatgcagcatggccgcgtgcgtatgaatgtagcgggttgcaatggtaatggacagcgcaggaacgccatttgccgtcaaatggatggcacccgaatcagttccgccgccggcaatggcatcaaattggtacggaatgccggcttcctccgcagtggctacaactgcatcgcgcaaacctttgtgagagaccatggatgcatcgtaaacgataatctgcgggcctttgcccattttgctctgcgcttccttctcggaaatgccaggcgtgtctcctgctatccctacatcaacaccaaacgcaatatcaggctgaatggtgtgtgcagccgttttcgctcccctcagcccgacttcctcctgcacggttccgacgccatacactatatttggatgatctgtgttttgtaagtttcttaacacatcaatagcaatcgcacagccgatgcggttgtcccaggcctttgcgagtaggaatttttcattgttcatgaccgtaaattcaaaatgcggaacgatcatatctcccggaagtacaccccactccaaggcttcttcccggcttgaagctccaatatcaataaacatgtcttttatttccactgatttttttcttgcttcaggagacaaaatatgaggcggcttagatccgataacccctgtgatttctcctttttttgtgacaatggtgacgcgctgagcaagcataacctgagcccaccagccgccaacggtttgaaaacggataaagcctttatctgtgatttgtgtcaccataaagccgacttcatccaaatgtccggcgatcataattttcgggccgttttctgcaccagttttttttgcaattaaactgcccaggcgatctgttgtcacctcatcagcaaatggttctatgtatgatttcatcacttgccttacttctctttcattgcccggtatgccttttgcatctgttaaatctttcagcatggtcaatgtttcatctaattttgccatgttccaaaccctccttcatcagtcctgcattcttattatacaaaacatggcgctaaccatacgactatttcacttgaaaatcgggtatatgtttttacagctttcttttagaaaaagtgaaacctttttctatgcttttcgtattacatcagatcatcaccataagggaggtgccttcacacaatgtttgtcatggttctaaggattattttgcttgcactttttgcttattgtatttatgccgtggtcaaatatgtcgcgaatcctaagagaaggcttaagctggcccaatcaaaagaacatttttatattattgatgaacaaaacaatacccggaagaattttcagctgacgtataaaggcgtgctttttgagggagaaaagcatattccttccaaggatcatccgctgtttattcacacgatctttgtctggacagaatctcctgagaagctgaaacatttctctgcaaaagattttgagaacattgaagaaaaagtgctggaacgatatccaaattgtaagattgactgggaccagcccattaaactcgcaaaaaaagcagaagagcgttaaacgcttttctgctttttataaatcaaacgggctgtagtaaatagcgatgagaatcgcttctattaccagaagaagcggtactccgtacttaaaagaagcgtgtttcgttttatgtctgaaggtttgcatgccaagccagacaccgagcgctccaaacacgatggctatcagccacagccggtcttcagaaattctccacttgtgctgctgcgctttgcgtttgtcaatgcccatcacccaaaaaccgcacagattaatcaacaccaaataagcagcaataatcatgttgcctcatcctttatatagaaaaagccgctctgctggagagcggctctatatgattacttgtttaattgagctttagcagcatcagcaagctgattgaatgcagtaagatcgtttacagcaagatcagcaagcattttacggtttacttcgataccagaaagcttaagaccgtgcattaaacggctgtaagaaaggccgttcatgcgagcagctgcgttgatacgagtgatccaaagtttacggaaatcacgttttttctgacgacggtcacggaaagcatagtttccagatttcatgacctgctggttagctactttgtataatgtatgttttgaaccgaaataaccttttgctaatttaagaacctttttacgacgcttacgtgtaacagttccgccttttactcttggcattgaatttccctcctaattgttccttatccgattacttgatgttagcaagcatttgtttgatacgtttgaagtctcctgcgcttacaacagcactcttgcgaagcttacgcttttgcttttgagatttgttggcgaataagtgacttgtgtacgcgtgagaacgttttaacttcccagaacctgtctttttaaaacgtttagcagatccgcggtgagttttcatttttggcatgggatttcctccttattgcttttcgtttttcggtgcgagcattaagaacatgctgcggccgtccatttttggttttgtttcgactgtcgcaacctcagcacatgcttcggagaaacggtctaatacacgctgaccgatttctttatgagtgattgcgcgtcctttaaagcggatagaagctttcactttatcgcctttttcaaggaatttaatcgcattgcgcaatttcgtgttaaagtcatgctcatcgattgtcggacttaaccgaacttcttttaagttaatgattttttgattcttgcgtgcttctttttcctttttctgctgctcaaatcggaacttaccgtagtccatgattcggcagacaggcggttttgcattcgctgcaactaacacaaggtcaagatttgcgcggccggcgatttcaagtgcttcctgacgggacttgattccaagctggtcgccattttgtccgattaaacggacctcacgtgcacggataccctcattaaccaattgatctttgctaataatgagccacctccatagtttcttcgaattgattcacaactcattttgaatgcattttgcaggcaaacaaaaagtgtgggcattataaaacacccacactacgaacatctgtatcaataaaaatgtacggtcaacctgccaactacatgcatgtgtcaatcaggtgagaagcgggtgcttctgcttgtgatttatattcaattcaataactattctacacaataccggatctttagtcaaggacgacttatccggaacaacttttacattgtaacatgggttttctatgagcgcaagagagaaaaagaaaatctttcatccccacccagaatacaaagaaccaacaattcccccttattacgcaatttacaacaaaaccaccgacaggaagaaatgtaaaacaaagttaatctctgaccgatataaggagcagaagggagcctgacacatgaacaaactgatacagcttgctttatttttcacattgatgttaaccggttgctcgaatagcagcacatcttccgaatcaaaagtcgaaaccactgttaagacaacggcagcatttcctcaaaaggagctggagaaagagctaaaaaaactaaaacccgtttcattggacatgaagttcgagagtccactcgctaccgagttaggaaagcggaaggcaaaagaggaagctgaaaagcaaagacaaatcgccgctgagaaaaagcttgaaaaagagcgggaggcgaaacgaaagaaacagcaggaggaaaaagcggagagacagcgattagcagagcagcaggctgcagagagacagcgattagccgaagcggaaagacaagctgaacttgaaagacagcggcaggcagcaatccaaaaagagcagaaagcgaacgctgagaaaaagcggcaatcgcaggcacaacggcagcagactgaggcaccctcatctaatagtcaagatccaccatcttcctcgagtcagacagataaaaccattcaacagccagcttcagagcttcctgatgacgatggttatggttatgaagaacgaaaaaagtggcatgacgatcaagtagaatggggcattaaacaagggtatatcgatcccgaagacgcaccataaaataaaaaaagccaaggcattcagccttggcttatcctccgatcagctgcacgaacacagggatgaccagaaccgttaccactcctactacgacaacagcaatacttgccatcgcagcttcaacttctcccatctcaatcccgaccgctacaccaagtgcatgtccggatgttccaagagccaatcctttagaaatcggatttttcactttaaacaccttcaagaacaatgctccgagcgcatatacgatgacagcgttaaagatgaccgcaaaggctgtgatgtcgctgatgcccccgatgccttttgataaaggaagcgcaattgccgttgtagccgcctgcggaagcatgcttttcattacggccgaatcgagatgaatgcctttagcgagcagataaacaatcgtgacagagcagatagagccggcaataatggaggccatgatttgccaccagtactttttaagcttatctctttgtttgtacaaaggaattgcaaatgcgatcgttgccggttcaagaaaaaacttaatgatctctcccccgttattataatccgcgtaggaaaaaccgccgatttttaaaaatgcgatccccagcaccatggcaacaaacaaaggagtgaaaaggaagaagcctttcgttttcttaaataaaaaggtgccgatgccgaatgcagcaagtgatacgacaatcccaaaataaggactcattgtgctttccatgtgaagaacctcctgtttcccttaatggtgaacgagttcgttattgttctgcgggctttgcactgtttttgttttcatgtccgcttcggttttgcgttttccgctcagcgacagaatcagctgagaaaacaatcccgtagcccccagcaaaataatcgttgcgagcagaatgacaagaacaatttgcaggccgtattgctgcatcacaccaagcgaattcataacagatatacctgatggaacaaataaaaatccgatcagagaggttaaagacgttccgagcgtctccacttgttccagtttaatgactttcaaacataataggagaaataataagaccaaccctacaaccgatgccgggataggtattgggacaatagcggcaatcatatttgaaaccagcataatgacggcaaaaataaatgcttgtgttaaaaacccgtacacttttttagcactcattttcttcacctctttctctttggtaccctcattataaataagaattccctgttataaagcgcttacaagataacatgccgtatagcgggtctgagttgcagaatcaaatggctgaaatgcaaaaagccgcccatcaaatatggagcagctttttcaattccttcgcatatgtccggctgaccggtattttcgatccgtctttcatgatcagattatacgttgaattaaaccatggctgaatttctttaatatattcagtattcacgacaaagctccgatggacgcggataaaatcagaatccggcagctttttctcaatcacaacgagtgtatcgctgaccgtataagaatgatcgaaggtttttacattgacatgaccatcttctgttccggcatagataatgtccttcgtatccacaatcacaatcgattcccccacagatagcgcgagcttgtgctggccggcatggctgttttgctctgtttctacaatatcccgattgacttttttatattttttcagcgtttgctgaattctttcttcatcgaaaggcttggttaaataatcaagagcgtccacctcaaacgctttgagcgcatactggtcatacgctgtcgcaaacacaatagcaggaggatgcttcattttcttcaatcgctttgcgatatcaaaaccgttttctccggataaatcaacgtctaaaaacagcaaatcaggtttttgatccatcatttggtcaaaagcggattcgatattttccgcttcattgatttccatttcatcattggtccgcttaagcaagtaagccagttcatcccttgccagcatctcatcatcaactattaacaccctgagcatgttcttctccctctttcatctgttgcattggcacttgaaaggaaacctctgtccctttatgaacctcactgctgatatgcagtgcagcctgctgtccgaataaaccgatcagccgctgatttaggttataaagcgctgtaccggttccctccttagacggaaacggtttcttccccagttccggcaagacgtccggcggaattccgcgtccgttatccgccaccttcatatagacggatgcatcatcagataagacacagactgtaaccttgcatatgtcttgttttttcggaaacgcgtgccgaagcgcgttctcgacaagcacctgcaaaacaaacggagggatttcaatctgctccagtctgctgtcgatattaagctcaattttatatttcccgggaaaacgcgcctgttctaatgacaaataggcgttaagatggttcagctcctttgagagcggaatcagcagctgtctcgctccttgaaggtttgaacgaaaataaacactgagctgcaataggagcttacgggttttttcaacatctgtacggcataacgcagaaatcgtgttgatcgcattaaataaaaaatgcggattcacctgtgcttgaagcgctttaatttcagcatccttgagaagtttgctttgcagctctgcttccccaagctcaagctgtgtcgaaaacagcatggccagcccctcggcaagttcctcctctacctgactcaggcctgccgggcttttaaagtacatttttaaggtgccgattgtattgccgttcgatgtcagcggtaggacaattgcagcgtgcaaagggcattcagcatgcgtgcattcaatctcttcctgcgaaatcgccttcataatatgccctgttttaatcacctttttggacaggccggtgatcaagcttttcgatgggatgtggtgatccattcccgcaccgacatgcgcaaggatcttttctttgtcagtgagagacaccgcatctgttcctgtcagcttatggataatagccgctacacttttacaggagttttcatttaatccttggcggaaaaatggaagtgtctgatcagcaatcgtaagcactcgatgcgtttcgagagcccttgcctgttcttccttgcgaatgatcgcttgaataatagacagaaaaataaaactgcctgttccattgatgagtatcatcggaattccgatcatgctgacaagctcccaagcgtcactgaacggctttgccatcagcaaaataatgatcatttgcagtgactccatgccgattcccacaagagcggcgatgcgcggtgtcggcattcgatatcgcttcgtaaaatacctgccgatcaagcctgcaagaacacccgctaaaatagatgagacggcacagcttaaggccgtgctgccaccgagtgaaaaacgatgcaggcccgcaagtatgccgatcccagcccctacaaaaggacctccgagaaggcccccgatttccacgcccaaaatacgggtattcgcgatagagcccgatggatctatcgtaaacacccagtcattgtttacaatcatatttctttgaatttcgatgcctgtataattgctgatgatgctgaaaagagaaaaaatagaaattaaaatcgcttttcctttatagccgtcctgattctgaagagcttgtctgaaaagtttcgtatgggcgagaatgaaccctaatataacaataatccccactctctccagcatcataatcattaaatgaatcattcatgtcacctgttctttccgttttcattctagcatgttttcgttttgcggctgactgtttttttaaaatcgtctgaaaacatatttcacaaggcttttatctattgtaaaataaaacatgagccttttggcagaaagatttgaatctgaagcagaggagaagatcatgaaagccgtattttttgatttagatgatacactactttgggacgaaaaaagcgtcagaacaacatttgcagaaacttgcttacaggcggagaaaaaatatggccttgcccctgaggaattcgaagcagctgttcgcgaagcggcgagagaattgtacatgtcatatgagacgtatccatatacagtgatgatcggcattaacccgtttgaaggactgtggtccaatttctcagagccaatcagtgaaggctttcaaaagctgaacaagattgtgccggagtacagaagaaatgcatggaccaacggactgaaagcgcttgggatcgatgatcctgcatatggcgaatacttgggagagttttttgcggcagagcgcagaaagcgcccgtttgtatatgatgaaacttttgctgtactcgatcaattaaaaggcaagtatgaattattgcttttgacaaatggcgatcctagtctgcaaaaggagaagcttgccggcgtgcctgagctcgctccttacttcaatgaaatcgtcatctcgggcgcattcggcaagggcaagccggatgtttcaatttttgaacactgccttaagctgatgaatattgaaaaagacgatgccatcatggtcggcgataatttgaatactgatattttaggcgcttcaagagccggaatcaaaaccgtttggatcaaccggactgataagaaaaacgaaactgacgtaaagcctgattacatcatcagcagccttcatgatttgtttcctatattagagaaataaaaaaagcatgatctcttcaatgagatcatgcttttttattttattttttcgcttcagctactgcctttttcacaaactcatcaagtgaaatggtttcagagttctgttctccgtatttacgcacgtttaccgctccgttttctgcttcttggtcaccgaccaccagcatgtacgggattttttgcatttgcgcttcacggattttgtagccgattttttcatcgcggctgtcgacttcaacacgcaggccttcacattgcaggcgttcctgcacttttttcgcgtagtctaaatgcacagccggagaaaccgggatgacttggaactgaaccggtgcaagccatgtcggcagcgcgcctttgtgttcttcgattaagaaagcaacaaagcgttccattgttgaaacgacacctctgtgaatgacaaccggacggtgctgcttgccgtcctcaccgatgtatgtcaggtcgaaacgttccggcaataagaaatcaagctgaaccgtagacagtgtttcttcttttccgatcgcagttttcacctgaacatcaagtttaggtccgtagaatgccgcttcaccttctgcttcgtaatagtcgtggccgatttcatccattgcctctttcagcatggattgcgctttgttccacatttcatcgtcatcaaaatatttctctgtatcttccggatcgcggtaagacagacggaatgtgtaatcacttaaaccgaagtcttcataaacatcctggattaaacggactgtacggataaactcatccttaatttgatccgggcgcacaaagatgtgtgcatcatttaacgtcattccgcgtacccgttgaagtcctgacagcgcacctgacatttcatagcggtgcatcgttccaagctctgcaatacgaatcggaagctcgcggtaactgtgaatgtcttgtttgtaaatcatcatatggtgcggacagttcatcggacgcaatacaagtgtttcattgtccatttccatcggagggaacatgccttcctgataatgatcccagtgtcctgatgtttcatacagctctttgctgcctagcacaggtgtgtatacgtgctcatagccgaggctgatttctttatcgacaatgtagcgctcgatgacgcggcggattgttgcgccttttggcagccaaagcggcaggccttgtccgactttttgagagttcgcgaacagctttaattctttgccaagctttctgtggtcgcgttctttcgcttcttctagcatacgaagatgctcttcaagatcagcttttttgaagaaagctgtaccatatacgcgctgaagcatttggtttttgctgtcaccgcgccagtatgcgcctgcaaggcttaacagcttaaattctttgatttttccggttgaaggaacatggacgccgcggcacaggtcaaagaattcgccttgctcatagatcgaaacggtttctccttcaggaatcgcatccaatagttcaagcttcaggtcgtcgccgatttccgcaaaacgggctttcgcttcttcacggctgacttcttttcgaacgatcggaaggttcgcattaacgatttttttcatttctttctcgattttcggcagatcctccggtgtaatcgcttcgtccatttctacatcgtagtaaaaaccgttttcgataaccggaccgacgccgaatttaacatccttgtagatgcgtttaatcgcttgagccagcaagtgagccgcactgtggcgcataatttgaagaccttcttctgagccttctgtaatgatttccactgtaccgtcttcattgatcggcgttctcaaatcgatttcttttccgttcagttttccggctaatgactttttctttaatcccggactgatggatgccgcgatatcttctgttgttgttcctttcgcaaactccttgactgctccatcaggaaatgtgatttttaccatatctgacatctttgtcactcctttttttgcatataaaaaccccgccccctatgaaagggacgaggttgaataaacggaatcgtggttccacccttttttccgcaaagccaatacacggcacctgcggctctaagctctgtaacgggagttcccgtcagccattactgttccttttcaagaggttcacagctgaagttcaaaggcggtaaagcgaatggtccttagctgggaagcttgcagccagggcttccctctctttgagccggtatcattccttcgtgtccttatcaatacgtgtgtctttcttaatctcctatgtattataaattgttcaatccaaaaaatcaacacgatcgcgtttccttttttttaaaccgacagccttaaatagacaggctgccggccctcatccttccgagtgcttcaccggtatttctgcatctgtaaaagcatgcagcgggagcatttccactctctcttgaaatacgttttgaatggtccttgccatcatgtgctcgggctggtcggtataaagcacgacttcatcaggcgcaatggaaatcagcggcgcgagcaaatgagaatcaatatacataggatgatcccggacaaatcttctgtctatgtatttcattttttcccgttccggcacatagcgcagctcccataatgtaaaggaaccatcatggacaatatgcacttttttgattcgcggctgtttggcgtccacatagtctctgagtgtttgaataaagttttgatattcctgttccatcttatattcatcaatcgctgcttctgtaatatctctcagctgcttatagtatgatccaagtcggaaggtctgaaaggagcgaatgtaaaatactccttcctctaaacagatcgtttggagttcatccaaaattgattgtttccgtgaaagcttcagcggctcaaacggaagatcgtctgcttcaccttcaataatactgtgtgcgagctgaaggatttgctgctgttcatcctggtccgtgaaacaatacgtttcctcaatcaatgacagcatatgctcgtcttctttgcattccaaaaaaaatttgaccagaatcggctccataaaacgctgaataggaaaagccggattcgctttttcaatcccgatttttcgtatgccttcacggacaatgatattgttccgatcgtccgaatgctgaatgagatgtaaaaaagcggctgcatcatggtcatcttcaaagattatttcaagcatgtttgtcccccttacggcatctgttacaagtatatgggggatgtttttaaaatagacgtaaaggtcattggcaaatcttaatttgattcttggaacaagttttgcattttctttctgaagatgaacggcaatgagataaacacgatatacaaagcgagcaccataaagaaagcgggcagattgccagccaaaaagctcgcacccagcacattaagcgcaatcgtcccagggatgattcccacagccgttgcggcaaaatacggcagcgctttgacattggaaaggcctgccgcatagctgacgaaatcaaaattgatcggcaggattctcaaaagaaagatatagaaaaatccgttatcctccatttgcttctgtatggcttcaagcctttcgtaatgcccgttctttttcgccgaaaacaaaccagccgcaaaaaacgaaacagctgaagcgcacatcgaaccgaataacgtataaagcgtgccgagaagcgggccaaacgcaagtccgccagctattgaaataacagacaccggaaataaaacaagtggcctgacgatggatatcccgataaacatcagaggtgcaaagactccgaacgacaatacccataccctgatttctttcggcgatacattcaaatacgttttatttccccaatagagtaaaccagcacctgcaagcactgccagccatttgacagccgtttttcgtttcataccctcagttccttcccctttgaaccacagcaattatggatgtcggcggttttctccgtcaaggcggatcggagcagccaaatataatatccgctccattaatcttgcagcttttacttcttctttttctcccctctgcgaatacgtaaaatgatgcttcagctcgtcaggtgagaaattagaagaaaagaacgttggcagctgctgggacattctgtgctgaagcaccgttccgatgacctcatcccttacccagcttgtcattgattctgctccgatgtcatcaagcattaatacgggtgtggtctttaccatattgagcttctcttccaatgtctggtcttgcagcgaattcttaagctctctcacaaattcaggcacataaacaatcatggaggaatactctttttccgccagctcattggcaattgcagcgagcataaacgtttttcctaccccaaatttcccgtataaatataatcctttcccttttcccgtctcattatagcttttcaggaagtctgtaacatgctgaaacatcgcgagtctgcttgggtcactgatatcaacttgctggaacgtcgctccaagaagatcctgctggatatacatgcttttcataagagactgttgtttcttctgctggtcgagcttccgtttgactggacattcgtaatactcgatatcaatagacctcccattgacaacaagcttcggatggtagccctccaacaaattgttgcagttttcatcttccgaacaataggagcaattcttgctttgttcgatatattcataaagcttatttaagctcttttcgatcattttttggtcaatcacttcttcgttttccttcaaaaatgcttgaacatcttgatctttcatgactttttccttcatttgttcaagacgtttttggaaatccggcctgccggttacgccctgcagggaacggccgattggttccatctattccttcaccccgcatctctgtctttaataggcagagtattttttcagtttttgcatttcttccatcatctttttcttctgttcttccaaatcctgcggatgcagcttctgctgtccggattctgaatcggacgctgtttccttttctgtcatccaatcaggaagcttttcttcacgaatcactttttggtttcgtttcgaagactttgtttttccctcagcccattcaagatactggcggttttcttctattgcgagcttcatcgcttccctgaccgttttcacctttttgcgtgcccaatgcgaagcgattttttggatatagtttttcgacagcttcatgtcggttttcagcatgacataataaattaacacatttgtgacgcctggctcgagcttctgttcgaacataatttcttctatgatcttcagatcagcttttgacggctctgttccgtcagcaatgtcctgcagaagcttcttcggggaaatcgcctccagcaatgcaatcagcttcccatccagagaatcctcttctgccggttgttcgccttcacgcagatgcaccggctgtgttttttccaccaaatcgggcagctgtccgtttctttcaatttgataccagtcgctcgccgcttttcttaatgcctccgtcgtaatgacgtcacgctcatcaattgcgctcatcacaacattttgcatttgcaaagggtcaattccgtacagataagaaagctttttgattgtgtcccgcacctgctgggtcatcgcttttctcggtatcatcgtctcagaaagtcccgctaaaaacaaatcaaaatcaaacacatcctccgttatggtgtaggacggagactgtccgacagaagtatactcggacccctcggcaagccttaccgtttcctccatatcggatgtgagcttccattcactcggctgcagcgattcaaacgcatgattaaacggacgcgtaatgtccttcgcatcttctgaaatggccgggtgcgtaaaaaattgttttaattgctgatatttcgtttttccgaccctattatacagaaaaacattcagcattccgtcttcaaaaaattcatttggtctgagcggcggaaggagttcatatataaagaggcgctcctgccgctcggattctttcatatatactttcagcaatccgatgccctcgagcttcccctgttcctgatggatcgtttttaagttggactgtgtcatccccatcagctgtctatgtgtggactctccgccccacagacggttttgttcaagctctccccacaatgtcatataaagagagaatgcaacagggccgattaagggctggtacagttgtgtaataatttgtctgtcaatatcctgcagcatcgatctgcttttaaccacatacgggtctacaggcagtacatctttccaatagtcagccatacattctcaaaccttccgaatttgtttctacctttcattttacaccgtttcttatatctatcaaatgccaattttgcacatgagaaaagagctagaagaatcctcttagctcttttaacgctctttctttattaagtcttttaattcatcgataaagacgtttatatctttaaactgccgatagacggacgcgaaccgcacatatgcgacttcgtcaatcttagccagccggtccatgaccatttctccgacgagctcactcttcacctcggagcagccttgattgcgaagttctttttcaatatcaaagcacatgtcttcaagcgttttgagtgaaacaggccttttttcacatgcttttatgaggccgcgcagcattttttctctgctgaattcctcacgcacaccttcttttttcacaacgatgagcggggtttcctccactttctcaaaggtcgtaaaccggtagtggcaggattcgcactcgcgtcttcggcgaatcgactttccgtcatccacaggccgtgaatcaaggactcgtgttccgttatgctggcatgaaggacatttcaataaaatcagctcccaactatatcgttccctgcaatgtattttcggcagcctccgccttttaaaaatagatgtgacagcatctgtcgggagagccgttgttaaatttgtttctatagcattaggtggtttgtgaaaatctccttcttattttacaaaaaaaatgaaaaaagaaaaagctgacactctcgtttctttataaaaataaaaggagcataagctaaaaagcgcataatggctttctagcttcagctccctttgtgttcgcaatttactttatagtactttcgcttgcgcctgtttaatttgcacaggccccattcctcttggtatttcaatgttttctcttgtatcagcatgtaatgcctctgcaatgtaatcagcagcgacattaggatctaagtctccacaagtataaacatcaatgctcgcatatccgtgctcaggaaaactgtgaatcgttaagtgtgattcagaaataatcacaactccgcttacgccttgcggtgcaaatttgtgaaatgcaacctcgcgcacctcagcacctgattttagagcagcatttacaaacgttttttcaataaaatccatgtcattcagcttatcaaaatcgcatccccatagctcggagataacgtgacgccccattgtttccatagtcatggaccccccttaacaagaattaaaaagtgaaattccaacaactgggtcggccatttaccacgggggaaagttagtccggagaggtcctaaccctttaagtaattccgaaacagtctcaagcaagaagttcacgaaaaatagtatactgtgtttaagtctaatttgcaaggtgcgttttttcagaaatatgctgttaagggttttttctttaaaatgtgtccatgaccttattttatacagcagacggatgtttcattcgtgccgctacatggcggattagatcaacaactctgcaggagtagccccattcgttgtcataccacgccagcacctttactttcctgtcttccattaccattgttgtaagcccgtcaatgaccgctgaatgcggattcgtattataatcagtcgaaacgagcggttcatctgagtaatcaagtacaccgtacatcgacgttttggcagcgcgtttaaatgcctcgtttacttcttcagccgtaacatccgttttcagatcaacaacgagatcaaccaatgagacgttcggaacagggacacgcaaggcgaggccgtgaagttttcctttcagatgcggcagcacaagcgaaagcgcctttgccgctcctgttgttgttggaatgatggattcaccgcaagcccgcgcccggcgcaaatctttgtgcgggttatcaatatttttttggtcattcgtatacgcatgaactgtagtcatcagaccgctctcaatgccaaactcttcatccagcacttttacaacaggcgcaaggcaatttgtcgtgcatgacgcatttgaaataatgacatggcgctcagcgtcgaattggtcctcatttacgcccatcacaatggtaacgtcttcattttttcccggagcggtcaaaatcactttttttgcacctgcttctatatggcccatcgctttatctttagcattaaacttccctgttgcttcgacgactatgtcaatatcatattcccgccaaggcagctgttttggatcacggctgtttaacaaaagcactttctttccatttacgatcaggctatcttcaccagccacaacctctttgtcgtatctgccgtgaattgtgtcatactttattaaatgagccagcgtttctgcggaatagctggcgttaatggccactacttgaatttgatcgtctaacatcgcttttctaaaaaccattcttccgattcttccaaacccgttgatcgctacttttaccttcatgttggacaccccttatcaattatgccatcctaatttgttactatctaaaattagtataacacattaaaacaaattcgccagtacatattgataaaaatcaacgattataacgctaatttatgatgcatcttatgttttcttgcacagaatatcaggcgtaagaaccaaaaagcagccagcgctccgcactgactgccctcatgctttatgattcctgttttaacttatcattgagcacactttcttctagcacagaaaatgtatccccgtacactctgttaatatgattcgctccccaagcacacagcatatctaaaatcccttctaagctgcggccgtattcgctgagctcgtattccactttgggaggaacttgattatatacgattcggttaatgacaccgtccgcttccagctcgcgcagctgctgagtcagcattttttgcgtgatattgggcattaggcgttttaattcacttgtgcgtttttttccgtgcgtcagatggcataaaatgacgcatttccatttcccaccgatcacttcaagagtcgcttcaacagaaatgttatattttttcttctccatacaatccattctcctcacaggcaccaaaaagtgactatagcacttcaaagtacgtacttttatttcttaacgatatgtttcataatcacatttgccggctgatttgaatctgctcttttttatttatatagcttactcggcagaatttcaatcatacaacacatcttacaaaggaggaacatcatgacttcagccaataaaagcaatattcctgcactactggctttggccgtaagtgcattcgcaatagggacaactgaatttatcagtgtcggccttttgccgctcattgctgatgacctggatattcccgtcacgacagcaggattgaccgtttccctttatgcgctcggcgttacatttggggcacctatattaacttcattgacctcaagcatgtcacgtaagacactattgctttggatcatgtttatttttattgccggtaatacgatggcagcaaccgcttcaagcatcgggattttactagcagcacgtgtgatatcggcattttcgcacggtgtgtttatgtcgatcggttcgacaatcgcagcggatattgtcccggaggataaaagggctagcgcgatttcaattatgtttactggcctcactgtggcaactgtaaccggagttccttttgggacatttatcggccagcagttcggctggcgtttcgcctttatggtcattatcgccgtcggaatcattgctttcattacaaatggcattcttgtaccgtccaaattacgaaaagggacgaaaacaacgatgcgggatcaattgaagcttgtgacaaacagccggttattgcttttatttgtcattacagcgcttggatacggaggaacattcgttgtgttcacgtatctgtctcccctgcttcaggaagtaacaggcttcaaagccgggactgttgcagtgattctgctcggatacggaatagctattgctatcggcaatatgattggcggaaagctgtcaaaccgaaatccgattgccgctttattctatatgtttatcgtacaggcaatcgttctattcgtactgacatttacagccccgtatcaagcagcagggctcattaccattctctgtatgggattgctggcctttatgaacgtgcccggccttcaggtgtatgtcgtcatgctggctgagcgttttgtcccgagtgcagttgacgtcgcatccgcgatgaatatcgctgcctttaatgcagggatcgcgcttgggtcataccttggcggtgtgatcaccgattcaatcggattgattcataccgcttggataggcggattaatggtggtcggtgcagtcattttaacaggctggagccgcttgatggaaaaacgagatcggcaggaagcctgacaattttaaaggaggaaataaacatgacaacacatttacaagcaaaagcaacacttcataatggggtagaaatgccttggttcggcctcggcgtgttccaagtggaagaaggatctgaactggtaaacgcagttaaaactgccattgttcacgggtaccgcagtattgatactgcagcaatctatggaaatgaagctggagtcggagaagggattcgggaaggcattgaagaagcaggcatttcaagagaggatctgtttatcacatcgaaagtatggaatgcggatttaggctacgaagaaacactcgccgcgtttgaaacaagtctgtccaaactcggtctggattatttggatctatacctcatccactggcctgtagaaggaaagtataaagaagcttggagagcgcttgaaacgctgtataaagaaggccgtatcaaagcgattggcgtaagcaacttccaaattcaccatcttgaagatctgatgacggcagctgaaattaagcctatgattaaccaagtggaatttcacccgcgcctcacacaaaaagagttgataagatactgccaaaatcagggcatccagatggaggcttggtcacctttaatgcagggacagctgctggatcaccctgtattggctgacatcgctcaaacatataataaatctgtcgcacaaattattttgcgctgggatctgcagcatggcattataacgattcctaaatcaacgaaggaacaccgcattaaagaaaatgcaagcgtatttgactttgaattaacgcaggatgacatgaaccgaatcgatgcactgaatgaaaacttgcgcgtcggtcctgatccggacaactttgatttttaatggccaaaaaacaccgttcaatatgaacggtgttttttgtattatgcccagctgttcatgatttcatcaagctgccttttggtctcttcaagcgtgccgctgttatcaatgacttgatctgctcttgctgttttttcctctaagggcatttgagagcggatacggctgactgcttcttcttctgtcagctgattgcgcttcatcagacgttccagttgaagctcttttgtcacactgaccacaataattttatcaaccaatgattccaatttgctttcgaacaatagcgggatatccaatacaacaaatgcctcccgatttgcaacggcttcatcacggcgattgagcatttcctgcctgactgcgggatgaacaattgcatttaaagcgagacgtttttgttcatttgtaaataccagcgctccaagcttttttctatctatatcgccatttgagagcagtatgtcttcaccgaattcgtcaatgatttgccggtaggccggcatccctttttctaccgcttgttttgcaatgatatctgcatctataactgttattcctttttcaatcagcatattggctaccgtgcttttgccgctagctattcctcccgttaaaccaatgactaaggtcaagagatccactcctttttacaatttccagagcccaatcgtgattaatagaagccccggcaaaaacgccattttatcgatccatttccacttagacagaaaatggccggcattgattccaattgatacaaacagcgagctcatgattgccacggcgatgctcatcacaatcggcgaaaaaccgagaatggctgcgcctatacctgctccaaaggcatcaatcgataaggcaaatcccaataagaccgcctcaattccgttgatcacacccgatttgtcgatatccgcactcatgggttttctcaaaatatgaatcacaattcctaatgaccgaacctctagattaagcagtgttttttcatgcaataggtattctttatcttttgccggtttgaaaaattgatacagaacccacgcaccgattccaaccaatatcaaaccgccaagcttctccgtcacatatacaggaaaaaacttcgtgagaaagcttccgatcagcatggatataaacatgacagcaccggaacagcaggcgataaccaaaatcgctttaaacggtattttcatttttctcaatccgtacgtaaatccgactgaaaaactgtccaagctgacagccaacgccagcagcagtatagaaaccatttgcatatccgtttcttcctttctgttggtgctcttgtatcagatgtgaaatgcccgggattcatcacaatcatatatatgggaaagtgaaaaatccgtgtttcgaaaatggcatccttaatccagagttactgatatatgcaccgacagcttggacaatgaagcattatgctacttttttgtctggcactttgcgcaaaaatgcgtgcctcttcctccaacgacaattttcgaaatcatcgttccgcaatttttgcatggctcgtctttttttccgtacacaaaatgctgcagctggaacattccgatttccccttgggagttgatatatgaacggactgtgcttccgcccgcatcaatcgcctcctgcagagtgtttttgatttcagcgtgaagggttttgattgttttatctgataattgatttgcttttgtctcgggatggacacccgctctgaaaagagcctcatccacataaatgttcccgagtccaactaccgttttttgatccagtagggcagttttgacagcgcggtttgttttcgcaagccggtcttttaaatacgcacttgtaaattcttctgcatccggctccggccctaactgagaaagcgggagctcgcccgcttcttctcccggtttaaataagtgcatggttccaaatttccgcacatccctgtaccggagctgggttccatccgtcatcgtgaatatgacatgcacgtgtttatcgtcaggctcctcggcttgatgaagaccgtattttccttccattcgaaggtgagaaaccataacataatgatctaaatgaaacagtaaaaactttccccgtcttccgatggactgtatcgtttctcctgctagttttcgcgcaaattcctccggttcggcaggccgtttgatgatattcggccatctgatctctaccgatttgattgtttttccctttacaagcccggtcagagtgcgccggaccgtctcaacctctggtaattccggcacatccatcacttcctatctctgtttatttcgcatcgtaccaagatgggcctgatgcaaagtccacctttaacggcacatctaatgcaagcgcatgctccatcacttcaggaacaagcttttcaagaatttcaatttcttcctttggcgcctcaaaaatcaattcatcgtgtacttgaagcagaagccttgctttcaactgtttttctttcagcttggcagccatgtcaatcatggcttttttgataatatcagcggcgcttccttgaatcggcgtattcatggccgtccgctccgcaaaacttcggatattaaagttccggctcgtcagctcagggatgtagcggcggcgatgcataagcgttgttacgtatcctttttgtttcgcttcctgtactgaatcttccatgtacgcttttacgccttggaagctttccagatagcggtcgataaatgctcccgcttccttccgggtaatgccgaggttctgtgacagaccgtaatcgctgatcccgtaaacaatgccaaagttgaccgctttcgcctggcgtctcatcgcagatgtcacttcatccttagcgacatggaacacatccattgccgttttcgtgtgaatatccatatcattagtaaaagcttcgatcagattttcatcctttgaaatatgggcaagcacccgcagctcgatttgtgaataatcggctgcaaaaatgagccagtctttttcagacggcacaaaagcttggcgaattttccgcccttcctcaagcctgatcggaatgttttgcaggttcggatcagtcgagctgagacggccagtttgcgttaaggcctggttaaatcgcgtgtgcactttatgcgaatccggtctcgtcacctttaaaagcccttcgatatatgttgattgaagcttgccaatttgtctgtactgtaaaatatagtcgacaatatcatgcttgtcagccagcttttcaagcacatcggcagacgtagaatagcctgttttcgttttctttacgacaggaaggccgatcttttcaaataagatgacgcctagctgtttcggagaattgatgttaaacggctctcccgcaatctcatggattttttcttcatattccttcagcttcgcacccagttcttcacccatccgttttaaacggtcaacatcgaccttgacgccagttgattccatttcgccaagaataagcgcaagaggcatttccagctcttcaaacagttcaagctggtcgttgttttccagctcttgaacgagcttttcccgaaggctttgaatcgctaacgcttttcggccaaggtgctcagacagtacgtcttctgacggcactgcccgttttgctccttttccataaactgattcatcacttgaaacgatatgcaggccgtaatccttagccacactcgcaacgtcgtcatatgaattgcccgggttgatgatataagccgcaaggagcgtatcaaactcggctcctttcagctcaatgccctgccagcgcaaagcgacaacggcccgcttgctgtcgaagacccatttcttctgctcgtcattttccacccattctttaaacacctcagactcaacggcaatgtctttcggaatgaaataagctcccgtttcatttacgatcgaaaatccgaggatcggctcttcatgataattatcgccaatctgttcaacgacaaatgcggatggagaaaccaatatatcgcttgtcacgtctgtgactgttttgacattaatgtcttccaacgattgatcctgttctgcttctgcactgtcttctccaagccgttcaagaagcgtgttgaagccaagatctttaaagatggcaatgacctgttcacgattaaagccttgatattccaggccggaaacagatacctcaatcggagcatccgtcataattgtcgcaagctccttgctcatcaatgcctgatccttaaactcctcaagcttttccttcaatttctttccgctcacctcgtcaatggactccagcagcttttcaacggaatcaaattgttttaaaagcttaatcgcagtcttttctccgacgccgggcacacccggaatattatctgaggaatcgcccatcagacccttcatgtcaatgatttgttcaggcgtaagcccatatttctctttgacatgctccggtgtgtaaaattcaacatcggtaattccctttctcgtaatggcaactgtcgttttgtccgttgccagctgggttaaatccttatctcctgagaaaaccttaacttcaaatccgtctttttcagccgatttggccagtgtgccgataatatcatccgcttcatattgttccagttcatagcggctgatctggtaggcatccagcagctcgcggataaacggcatttgttcggaaagctcaggcggggttttctgtctgccgcctttatattctttaaatgtgccgtgacgaaatgttgttttcccggcatcaaacgcaaccagcatgtgcgtcggtttttcatcctcaagcattttcatcaaaatcatcgcaaagccgtatacagcattcgtatgaacacctttatcattgcttaacagcggcaatgcaaaaaacgcccggtaagccagactgtttccgtctacaagcactaatttttttcgttccgtcattcaatttcctcctaagaagcctcaggcttccattcatctcttacatagtcattagctcctcttattttaacaaagttcaatttgaaaggaaaatacgtgaactataagagaagacacaaaaaaggacgggaacacaaataggttcccgccgtcaaaattggctccttggatgaaggggttctactacatcctaccagcataggtttaacagtgcatgaagatattgttaaacctttgtaaacattaggcggacttttcagcggcccgtttcagcgtcacggtaaagacagttccccgtccaagctcgcttgtgacatcaattttcccttcatgagcctctattaaatgcttgacaatcgctaggcccagcccggttccgcccgaatttctgcttctgtctttatctacacggtaaaagcgttcaaagatgcgcggaatttcttctttctgaattccgattccagaatcggcaacctcaatctgaatgtctttttctctgggctttacattgatagccacggagcccccctcaggcgtgtaggttaatgcattgtttacgagattaagaaatacctgtttcagcctgtacgggtcaccagatacatattgagggtctttcgggacattcaggtgcaaggagatgcctttctcatccgccttatgcttcagaagcgtttcaatctcaccaagcattttggccggctcaaacgtttcgatactgagcgtgaaattttgctgctcgatttttgagagatcgagcaaatcctgaaccaaagactgaagcctttcgctttccttaagaataatagagagaaattcagaaagcgcctctttgtcttccatcgccccgtccaataacgtctccgtaaacccttttatggacgtaatcggtgttttcagctcatgagaaacattggccacaaaatccttcctcatctgctctaatttcttcgtttccgtcatgtcatggaaaacgagcacaattcctttccattcatcgtccggccccataatcggaacgccgtccacttcaaaataacgccgttctattttgatcggcagtcttaacagcttgcatttctttgtctccgtcataaaaatgtcttcgacaagctggatcacttcttcatgttcaaatgcatcgtgataaagacggcgcagcatatgattcggattgatatgaaactgcttggcgtaagacctgtttacgagattaataaagcctcttccgtcgatcataatcagcccggagccaatgttttcaatgactgtcagcagccgatcccgctgcatttcctgcgttcgcgtcatttccatcagatcaatggcaaggctgttcatcgcatgtcctagcttatcagaacgcctaatatagccgccgtacgtccgtgcatcgtagttgcccttagagagttctgtggctacatttgtcgctgactcaattgaccttttataacgtgaggtcatgctggaataaaaataaacaatgacgataaatgcggtacaaagactggccgtcagcatcccccacaattcgccttttaagccgtcgcttttttcagaggcggaaagcagcacatatcctgttttttcaccttcgcttctaagtgaaagtccgtaataaagcttgttatctgttgttgacagaataccctcatggccagaaacaagcgcctgcaccttttgggaatcagccgatctaccgtttgacccatacagcaccttaccgtctgtatcgataacggatgcgctcacatcaagcgcgccgcctgcatctttaatgattttctcatttgcttgattattcagattgccggcatcaagaagcgaagccaagtattttgcttctttttcaatgtgttcctctgctttcctttgatcagatgtttcaaaaagctgctgtaaaaacagcccgaggacacaaaacaccagaatcatacagacaacgaatacagaaaaaaggcgcacacggtatttattcattcatttttggctcctccagtttataccccaatcccctaatcgttttaatgtagatcggttttttggtattgttttcaattttgtcgcgaagatggctgatgtgcacatcaacaattctcgtatctccggcaaaatcataattccagactgcgctcagcagcaggtctcttgtcagaactctgcctttatgtctgcctaaatagagcagcagttcgaattctttcggtgtcagttcaagctgactttctttaaagtacgcttcataatgatcaggcaggattttcagatcgccgattacgatctggccttccatttcatcgttcttcatctcactagagggcgcagctatttccgaacgccttaaaatcgctttgactctcgcatttacttcccttggactgaacggcttggtcatataatcatcagcaccgagctccagccctaatactttgtcgaattcctcatccttcgctgtcagcattaaaatgggaaacatcagtttttgctgtctcagctgcttgcatacttcgattccgtccaattttggaagcatcacatcaagcacaatcaaatcaggtttctctgtttccgcttttttgagtgcttcttccccatccgaggcggtaatgacatcatagcctgaccgttccaaattgtactgtaaaagagtaacaatagattcttcatcatccacaactaaaattttcttgttcatgctgtgcctccagtattataattccccgacatcctatttctctattttatgtcatcttaacatgtttcatgattttattttagcgaaagcaggacattccgacaattcgccttttacatcatttttaaaagaaataaagacgtttatgatagcgctttcatttatagtaaaaagagaaaggctgtattaagcaagcctttctctctttttattaggataatactttcatgacatttttgacagattcaactgatttattcagctgcgctctttcatagtctgtcagttcaagttcaatgatttgctcaagaccgttgccgcctacaattgtaggaacaccaaggtagatgccttcatagccgtattccccttcaagataagcaattgtaggaaggacgcggcgctgatctttcaagatcgcttcgaccatttctgtcagagaagccgcaggcgcataatacgcgcttccgtttccaagaagattcacgatttcgcctccgccttttctagtgcgctccacaattgcgtcaatccgttctttcggaataagagtttcaagcgggataccgccagcataagaataacgcacaagcggaaccatatcgtcaccgtgtccgccgagtacgaaaccagtcacatctttcactgacaggtttaattcctctgccacaaatgttctgaatcttgccgtatcaagcacacctgactggccgattacacgctctttagggaagcctgattctttgtacaccgcgtatgtcattgcatcaacaggatttgtcagcaccacaataatagagtcaggagaatatttcacgatttcctgcgtaacgcttctcataatcttttcgtttgtagagaccagatcatctctgctcataccaggttttcttgcgataccggctgtaatgacaacaatgtcagagccggctgtatcctcgtaattggatgttcccgtaatttttgcgtcaaagccttgaaccgggcttgcttcaagcatatcaagcgcttttccctttgtcgggttctccaattgcggaatgtcaacaagaacaacgtctgccagctctttttgagcgattaaaaatgcagttgtagctccggtaaaacctgctccgataacagaaacttttttacgagtatttcccatgtctctcttctcctttatggctagttttaggctttttccttgcttagtccatgtttttgatcagttcttctccgaactctgaacatttcacttcagtcgccccgtccattaatctggcaaaatcgtaagttacgactttagaagcgattgttttttccatagatttgataaccaaatcagccgcttcgttccatcctaaatgctcaagaagcagaacgcctgaaagaataactgaagatgggtttactttatcaaggcctgcatatttaggagccgttccgtgcgtcgcctcgaaaatcgcatgtcctgtttcgtagttgatgttcgctccaggagcaatgccgattccgccgacttgcgcagcaagagcatcagaaatgtaatctccgttcaagttcattgtcgcaacgacatcaaactcgtttggacgcgttaagatctgctgaaggaaaatgtcagcaatgctgtctttgataatgatttttcctgctgcttccgcttcgctttgcgctttgttggcagcgtcttttccttgttcttcagcaatgcggtcatattgagcccatgtgaagactttatctccgtattctttttcagcaagttcatagccccagtttttgaaggcgccttctgtgaacttcatgatgtttcctttgtgaacaagtgttacagatttgcggccatgctcgatcgcataatcaatggcagctctgaccaagcggcttgttccttcttctgaaacaggcttaatgccgatacctgatgtctcagggaaacggattttattgacgtttaactcattttgaaggaagctgataagcttttgcacttcttcagagccttttgcatactcgatgcctgcgtaaatatcttctgtattttcacggaagatgaccatatcagtatcttcagggcgttttaccggtgacggcactccagtaaagtatcttacaggtcttaagcagacgaataggtcaagctcttgtctgagcgctacgttcaaagaacggataccgccgccgacaggtgtcgttaacgggcctttaatcgcgatgaaatattcgcggatcacatctaatgtttcagcagggagccactcacctgttttattataagccttttctccggcgtaaacttctttccatgtaattttcttttcgcctttgtatgctttttctactgctgcttccaaaaccttcgaagccgcgttccaaatatcaggaccggttccgtctccttcgataaatgggataatcgggttgtttggtacgtttaatactccgttagagactgtaattttttcaccttgtgccacaataaaaacctcccagtatgtaattcatatttagaaaacattttatttttcttatatagaaaataaaatgatttttcctaacattcaatttaaagtgtaacccaattttgatgttctgaacaagaggctaacctcattgacgcaagccagcctccaatggttctttaggctctttcttcaatcggaacgaatttttgtttgtcagggcctgtgtaatctgcccgcgggcggatcagacggttgttgtcatactgctcaagaatatgagcgagccagccggacattctgcttacagcaaaaatcggtgtaaacaaatcatggtcaataccgaggctgtgatatacagaagccgaatagaaatcaacgttaggcggaagctttttctctgatgtgacgatgtcttctatacgaatcgacatctcataccatttgctttcgcctgtcaggttggtcaggcgcttgctcatttctttcagatgcttcgcgcgcggatcaccatgcttatacacacggtggccgaatcccatgattttttctttcttttcaagtttagcgcggatgtacggctcagcgttttccacttcaccgatttctgtcagcattttcataacgccttcattcgctccgccgtgaagaggccctttcagcgcgccgattgctgcagtaatgcctgaatagatgtcagaaagtgttgcgacgcagaccctcgctgtgaacgttgacgcgttcagctcatggtcagcatgtaaaatcaatgctttgttgaaggcttcaacttcaattggtgaaggctcttcaccgtttaatgtgtaaagaaaattctccgcaataccgtaatcttctctcggttcaacaggctcaagacccttgcgaattctggaaaacgctgcaaccaggccaggcacctttgcctgaaggcggatcgcctttctgtagttggcttccgggttcatggtatcagcctcgctgtcaagcaggcctagtaatgaaattgctgtccgaagagcagccatgggatgaacattttcgagggaataagatttgaagtgctcaataatttcttgcggaacggcagcttcctttgcaagctgctgctttaactcttcaagctcttttttgtttggcagccttagatgccaaagcaagtagatgatttcttcaaaacttgcattctctgtcaaatcatcgatatcataccccacatatgtaagggtatcatcaataatagaactaacagatgatgttgttgctacaaccccttcaagaccgcgtgtcgctgtcatatataacatctccttttcaataaatttcccctttaagagtgttgtaaaaacatgaggcttacttaaaaagcacgatgcaagtatttctctcccccaaaaagaaaatgcttacattttactggctgctggaactaaaaccctttgcttatgaaagaacataacaaattcttataagcttatttaagtttaagcctattctcattataaacaataatcagacatttgttaaatgtttacctataattttttttttccattctgtgatttccccgaaaaaacgcctttatttgcgggtttttgcataaaaaaaagcggctttaaggccgcttttttttatgaagtgaacagttttacgatctgcatggctaaataagcaatccccgctccgatcagcggccccaccgcaactcctccaaaaagcgcgactgcaagaatggtcccgatcacgagagcagttgtaatatgcggatcattttcaagcagggtcaggccgttttttgcaatcagcgccactgcgatccccgctccaagggcgatccatgcgtaggaagaccgcattgcttctccaagctgcttaaatccgatttctcccgtggcaatcgggacaagaacggcgatggtaataatggtcacaccccagttaatgccttttgactggatggtcggaaataatttctgatcaagcccaacgattttgatgatcaaaaggacggatacagcaaagagcaatgattggttttttgcgataagtgcgatagccaagagtaaaattaaaaataaattcgcttgtgtaaacacatgccatccctcctttaagatgaatgtattcatattcagccgcagcgtgaatacatataaaaaataggacatgctgacgagaggaggaccgtttttgtgaatcaatcttatatcactatttttttcagaaccctctttgtcatatcaatgaccgcagggtcgatagctgcggcctattattcgtttccgttaacttatccgttcctgatcgcccttattctatcttcagtgattcatcctgttgtcgattatttggacaaagtgacaggattcccccgaacgataaatgttctgggcgttcttgctttttttctgctcgcagccttcggcgtgctcaccattctggtagccgaaatcgtaacgggaacagcctatctagcaaaaacgctgcctccgcatatcagcacgtttatttcatattgcgaaaaattgtttaccactcatattcagccgctctataacgagttaactcttttgtttcaagaattggaaacgaaccagcaggcttccatcgtcactcatatccagacactcggtgattctgccgctaaaaatgccgggctcctgctgtcccacattctagagatgatcccgagatttttcgctcttcttcccaatacggcggcggttctgattttttctcttctggcaaccttttttatgacaaaggattggcataagctgaaagccatgcttgttttaattctgccggatcgtgtgacagctaacagcaaagcaatcagcagcgaattaaaaaaagcaatgactggttttatcaaagcacaagccgtcctcgttttcatcacgatggtgattgtatttatcggcctttctctcttaaaggttgaacacgccgcaacaattgcttttttaatcgggcttgtagatcttctcccttacttaggtgccggctccgtatttgtgccctggattttgtatttatcgattacgggccagctgccccaagcaatcggaattggtatcctgtacctcgtcgttcttattcagcggcagctgacagagcccaagatactaagtaaatctatcgggatcgatccgctggcaacactcatcgccctgtttgccggctttaaattattcgggtttttaggactgattgcgggaccggctgtactcgtcatcatccaagctttcatcacaacaggcgcattaaaagaaatatggtcctatatcaccgttcagcaaaaataaaacggcagccgttttttcatggctgccgttttttatttgatgatgatccgcttattcttcgacattcctctcagccatttgaacagaatcggcttacaccagccgcgggtaaacgggataagaagacaggcgccggccaaatctgataaaaagcccggaagcatcagcaatagaccgccaatgaaaatgcacagaccgtcagcaatcgcttctcccggcattttgccatattgaagatcacgctgaaccttataatacacttcggttccttgtttttttgcagctgctgcgccgataatgccagtcagaatcatgaatagaactgtcggcaaaataccaatcagatttcctaaaaataggaatataccgatttctattgccggaaacacaataaaaagcaaaaacaaaaatctcatatccaagccccccacacgtgtaacacgttctgttcaacaaaaggcatgataaagagaaaaggaagggattccccttccattttcacctgtaattaaagaacgctcgcacggccttgatagactgcgcctctggaagcgtcaactgtaatatcctggccatctgtcaaaatagatgtcgcattttccagacccacgataaccgggatgccaaggcttaatccgactaccgcagcatggctagtcaaaccgccttcttctgtaataagagcagacgctttttcaagggatgcaatcatatcacggtcagtgcttttggtaacaagtaccgcaccgtcagtcattttttgctcagcttcttttgcattttgtgcaacgacaaccggaccgtaagctgatttgcgtccaatgccttggcctttagcgatgatatcgccgacagtatgaaccttcattaagttcgtagtgccggactcaccgacagtgccagctgtaataacgataagatcgccgtgttttacaattccgctgttcaatgatttttggacagcatcctcaagcatctcatctgttgagctcgcattttggccgctttccgcgaatacgccagatacgagggcaagctttctggaaatagagtcatttacagtaaccgcaacaatcggagcctgcggacggtattttgcaatcatacgtgctgtatggccgctttctgtcggcgttacgatcgcagcagcattcaggttaatcgccgtatgtgcgacagattgtccaattgcgtctgtaattgtcatgcccacttggtctctgcgttttgagagaatttctttataatttaatgcttcttcagaacgggacgcgatgttatgcattgtttgaactgcttcaaccgggtaacttccggcagcagtttcaccagaaagcatgatcgcatctgttccgtcgaagatcgcgtttgcaacgtcacttgcttccgcacgagtcggacgcgggttgcgctgcatgctgtcaagcatttgtgtcgctgtaataacaggtttgcccagcgcgttgcattttttgatcagttctttttgcacaagcggcacttcttcagctggaatttccacacctaagtctccgcgtgcaaccattaagccgtcagacacttcgagaatcgcatcgatgttgtcaacgccctcttggttttcgattttagggatgatttgaatatcctgagcgttgtgctcttcaagaagctcacggatttcgagcacatccgtagaacgtcgaatgaaagatggtgcgatgaagtctactccttgctcaataccgaaaacgatgtctcgcgcatccttttcagtaatccccggaagattgacacttacgcccggtacgttaacaccttttttatttttgagtgttccgttgtttaatacttttgttttgatttcgcgtttagcggcatctacatcaagtacctcaagaccgataaggccgtcatctaacagaatcgttgaaccttgttcaacgtcatggactaaaccttcatatgtcactgaaattttatctgttgttcctacaacctcgtccattgaaataatgagctctttgcctgtttcaagctcaataccgccgttttccattgtatgtgtgcggatttcaggaccttttgtatcaagcagaattccaacgttcttgccaagttttttacttgcttcgcggatatttttaattcttgcaccgtgctcctcaaaatctccgtgagaaaagtttaatcgagccacgttcattcctgactccattaatttcgtaagcatttcaatactttcacttgccggaccgatggtacaaacaattttagtttttctcatttggttcacttccttctgaaatcttcagccttcagctgtacattagatagacagttcttttgaaagctgatacatgttttgctcaactgtgtgttttgtctcaagtatttctataatatcatggtctacaagcttattgttttgtatacctacacagcgtccgccttttccttcaagcagcagttcaactgcatatgcgccgagacggcttgccaacacacggtcagcagcactcggagaacctccgcgctggatatggcccaatacagataccctagtttcaagatttgtttcttcttcaatgcgtttcccgaattcaacaccgctgcctacaccttcggcaacaataataatactgtgcttcttgccgcgttcgtggccgcgttttaagcgggcaatgatttcgtgcatgtcatagtctgcctcagggattaagatcgattctgcgccccctgcaagaccggcccacaatgcgatatcgccggcatgacggcccattacttcgattacatatgtacgttcatgagaagtcgctgtatcgcgaatcttatcaattgcgtcaattactgtatttaaagctgtatcgaaaccgattgtaaaatcagtgcccggaatgtcattatcaattgtacccggtacacctacacatggaaacccgtgttccgttaattttttcgcacccatataggaaccgtctccaccgataacaacaaggccttcaataccaagcttcttcaagtttgctatccctttttcacggccttcaactgttttgaattcaggacatctcgccgtataaagcttagtccctccacgatgtataatatcgcctactgatccgagttcaagcttttcaatctttccgctgatcaatcccgcgtatccgttgtaaataccgtaaacttcaacgtcatgatagatcgcttttctgactactgcgcgaactgctgcgttcattcccggggaatccccgccgctcgttaatacccctattcgtttcattctccattcacctcagcaacatatatgattaaacataacatgatcattgccctaaaaacaatgaaaagggatctccatcctccctatgaaaccttacctattatacaattaaataaattgtttttaaataaaatttaaggaatgtcacaaaaaataaacgtgagccaaaggcttcacgtttatttagtttaccccgatatattgatcttcaaccgagactttgccaattgctttatatttttcataacgctgctgaactaattcttcttcgctcagcttcagtaaagtttttaacgattgtttaagggtttcgtccatatagcttgcctgcagcttcacatcatggtgcgctccgccttttacttctttaatcatatgatctataatacctaattcttttaaatccggcgcagtgattttcattgtttctgctgcttttttagcaagactggagtccttccataaaagtgccgcggcaccttccggagaaataacagaataagtagagttttccagcatatgcaagtgattgcctacacccagaccaagggctccgccgcttccgccttcaccaatgacgatgcagataacaggcactcgaaggccggccatctcaaacaggtttttggcaatagcttcactttgtcctctttcttcagctgctcgtccagggtatgcccccttcgtatcaataaaacagataattggtctgttaaatttgtcagcctgtttcatcagacgaagcgcttttctgtagccttctggatgcggcatcccaaaattgcggactaggttttccttcgtgtctttgccgcgctgatgcccgattaccgttacagggaggccgtggaacttcgcaatcccgccgacaatggcttcatcgtccccgtacgctctgtctccgtgacattcaaaaaagtcggtaaacaggtgttcgatataatcaagagttgtcggacggtccgccagacgcgcgatttgaacccggtcccacggcttcaaatttttgtaaatatcatcctgaagcttagcgagacggtcttcgagccgttcgatttccgcacttagatccatatcggaatcttgggtgaatttttttagttcggcgattttggtttgcagttcaatcaccggtttttcaaattctaatcttggagccactcaatgtcacctcctgtttgatgcatatccagcagattttctaacgtttttttcatatcgtcgcgatgaataaccgcatcaagctgtccatgttttaataaaaactcagccgtttggaagtcctcaggcagtttttctcctattgtctgttcaataatccgtcttccggcaaaaccgatcagcgcgccaggctcagcgaaattgtaatcgccaagggatgcaaagcttgctgatacgcccccggtagtcggatgcgtcattactgaaataataagaccctgttcttcactgaacagttttaacgcagagcttgtctttgccatctgcatcaaacttaatacgccttcctgcattctagcaccgcctgaagccgtaaaaataataaacggaactttatcagcttttgctttttcaatcgcaagcgtgattttttcaccgacgactgaacccatgctgcccattctgaatgaagagtccatgacggcgacaacagccgggtgtccgccgatggtgcccttgcctgtcacaacagcctcgtttaaggatgttttctcgcgatctttttcaagcttttccagatatcccgggaaaccaagcggattttccgagagcattccctgattaaattcctcaaaggattgttcatccatcaagctttcgatacgctgttttgcgttcattgggaaatgataatcgcagttcatgcatacccgcatatttttatccaactctttagtgagcatgatttttttacacttaggacattttgtcataatgccttccggaacatcgtgcttcgcttgatcagacggtacggaagcatactttttctttttcgtgaatatatcctttaacaaatgattacctcccttttgtgaagggttctcttcaccgcatgtcatcaaacagatagacttgctaataactttaccgaaactattgtactttttttgtcaaacgctgtcatcctcaattcgacaactttttattcgatgacgtgctcggaaaggcttgtatgaaatcagataaggtgttgaaacgacaaggttgacagcgcattcaaaaataatgttaaacccggctgaaatttttttaaggctaaccccctaaaaaaatttcagccgtcagtttaacttgagaacagcgcgccggtctccgccaacgcgctgccatttttggaatgaattaaaattattcaccaataatcgtaagttttcttgttttttctgcgacttcctcagggtcaacagtgattcttgcaacacctgtttccatcgcagcttttgccacagccttcgcaacagcaggcgcaacacgtttatcaaacggtgcagggatgacatagtctgcgctaagctcatcttctgaaaccagtgaagcaatggcttcaaccgctgcgattttcatttcctcgttaatatgagtggcacgcacatcaagcgctccgcggaaaataccagggaatgcaagaacattgtttacttggttcgggaagtcagaacggccagttccgacaacgcttgctccggcttcacgcgcatcttccggcatgatttccggatttggatttgccattgcaaagataatcggatcttttgccatgctttgaaccatttcttttgttaacgcgcctgctacagagacaccgataaatacgtcagcatcaacgataacatctttcagagaaccgtctttgcgatcttggttcgtgaacttcgccacttcatttttgacatcgttcatgccgttcgggcgcccttcataaatggcccctttggaatcgcacatcacaatgtcgcgaacgccataatgatgaagaagcttgataatcgcaatgccagccgcacccgcgccgtttgcgacaactttaatggatgacatggattttccagacagtttcagcgcgttcacaagacctgctacggttacaatggcagtaccgtgctgatcatcatggaaaaccgggatgtttgtttcttttttgaggcgctcttcaatgataaagcagtttggcgctgcaatatcttcaaggttgacgccgccaaatgtcggttccagcaattttacagtttcaacgattttatcaacatcgtttgtgtttaaagcaatcgggaacgcatctacgcccgcaaagcttttgaaaagaactgctttcccttccataacaggaagcgccgcttcagggccgatgtttccaaggccaagcacagctgtaccgtcagttacaactgctaccatgttccccttcattgtataatcatatactttgttaatgtcttcatgaatatccttacacggttctgcaacacccggagaatacgcgaggcttaaatctttcgcatttctgacctctacttttgatttagactccagtttcccctggttgactttatgcaggtgtaatgcttcttctcttaatgacattctcctaaacactccttatggatattttttgattcgtatactgctgcgttgattgctgcattctgcggagtaaatctatctgaatatttaaacaggatcacataattgctccaattgtataacaaaaagcgaatcgttaccactgttttaaaacgacgtttttttgacccaacagctcttttaagcgatataacacctggtgatctgcattgatatggaacgactcaggtagcttaatcgtctgtttttgcctttcataatagagataaacgcctgtttcccctttatgctccagcaaaatgcgcttaatctttgccaggatctcctggctgtgctgactgctttctatttttatataaaccgatggcgctttttctgcatccatatcttctaataattctgcccgggacatgatgaattggatcttatcttgtctaacttcacatttccccgcagtgaacaaaagagcgccttctcttaaaacgggagaaagctgtctgaattgttcagggaagactacggcttccatctcgccggtttcatcactgagcgttaaaaacgccatgttttgacctgttttcgtccgaatcgttttgatcttcgacagcagaacgcctagtgaaagctgccttttgactgcccgctgagcctgcagaatggagactgctccttgcgcagtgagctgttttcggaaggcggagaggggatgatttgaaaaataaatgccaagcgtttccttttcaaacgcaagtaaatccaccagaggaagctcctccgtctccacatacttcggcttaattgaaaacgattcatctaaaaacaatcccatttggtcatcgtccgcggcgaatagctcagcatgttccaaagcaacatcaatggatgcgagcagcgtggcccggttttggccgaattcgtccatcgcaccagaaaagataagtgcttcaagcattttgcgatttacgctttttgacggcacgcgaaagcagaaatcgaaaagatcttcaaatggtttctcttttcttgctttatatatatctttgactgctgagacgcctacactttttatcgcgcggaggctgtatctgacagatccgttttcaactgtaaacggaaaactgcttttattcactgacggaggaaggatacgaatcccgctcccctttgcttcgtaaagatattgagagattttatcctcattgccaatgacgcttgtcagcaatccgcacataaaatataacggataatgagctttcaaatacgcaagctggcacccgatcatgctgtatgccaccgcatggcttctgttaaagccatagtttgcgaatttgacgattaaatcgtagacctcatttgcagtgtctacagaatactccttttttaagcacccttcaacaaaatggcttcgctctctgtccaggatttcttttttctttttgctgaccgcccttctcaataggtccgcttcgcctaaagaaaaccccgccatacgggaagcaatcatcataatttgttcctgatacacaatgacgccatatgtatcttccaaaatgctccttaaatcttcatgaggatagtgaacaggcgcccgaccgtgtttacggtcgataaataacggaatattttccatcggacccggccggtacagtgcattgaccgccacaatatcttctaggcccgaaggtttcagccgtttcaagacgcttctcatccctgcagattcaagctggaaaatgcctgtcgtatccccttttgacagcaaggagaacgttttgtcatcgctgtaggaaatacttgaaaggtctattttaatattttcttctttttcaatcattgaagtgatggattcaataagtgtcagattcctcaaacctaagaaatccatttttaaaaggcccaagtcttcaagatggtccatcgcgtattgcgttaaatagatcccttcatgcccttcttgaagcggaacaacatctgttaacggttcttcactcaggacaacgcccgctgcgtgggttgatgcatgccttggcagcccttctattttccgggcaattgaatagacttgctgaagcaggcttgactcccgaagccgcttatccagctgcggtgactgctgtctcgcttcatccagcgtcattcccggtcttgaaggaatgagttttgcaagctgatctgcctccttcgggctgacgccgaatactctgccgacgtcccggagcgccgcctttgccgcaagtgttccaaaggtgataatctgtgcgacgtgcattgcaccgtatttctgctgaacatattgaatgacttcatcccttctagtatcgggaaagtcaatatcaatatccggcatgctgacgcgttcgggatttaaaaatctttcaaacagaaggtgatgcttaatcgggtcaacatctgtgatatacagcacatatgccacaagagaacccgccgcagaaccccttcccggtcctgtaacaatccctttttcatgggcgtgcttcataaaatcccacacgatcagaaagtaatcgctgaacttcatccgcttgatgacatcaagctcatattgaagacggcgaaggtatcgttcatcaggcttgccgaaacggctgcggagtccctccatacagatatccgttaaataatcatcagcggacgttccgtctggggtcggaaaagacggtagacgggtctgcccgagactgacgtcaacccggcattgttccgcgatctctacagaagcttgcagtgcctcgggatgctctcgataaatgttttgcatttcttcgagtggtttcaaatcgagatcaggcaaatcttcagcgggtgcatccgtcagtttttcccccgctttaatcgctttcaaacaacggtaggcagccttatcttccttccttatgtaatgcacatcgcctgtggccgtaacagggatacccgtttcttctgacagctttagaatctgctcagacaagacttgattccctttaaaaggctgataggagaaataaaaagctccctttccgaatatagactgaaattccagcgaggcttgagcagcctgttcgaacagccctccttcaagaagcgtttcaatatatcctttttcgccgggcgttattgcgataatcccttctcgataactgtgaagccatttcggcttcagtccgccttttgatttagattgcagaacgctgctgattttcagcaggttttgatagcctgtattcgattttgccagcaggacgagcgggtatgcttcaagctcgctgtcatctgtaaaaacagaagccgtcaaaccgattattgggttgatccctctcgccttgcaagctttataaaattgaatagctccgtacatgacatgatcatctgtcagcgccaaagacgcatatccgagcctgtcagcttcactgacgagttcttccacagccgcggcgctgtttagcaggctatacccgctatgcacttgcaggtgaacaaaagacatgctatcacctctttctcattacgatccatttcttccttcattataaggccggtttccaaaagaaacaaatgttcttttttgactcatcatcatacttgtcctgaaagctcaatatgatataaaaggtgaggtgataaagatggatcaggaagcaggatttatggtgaattttatcaatagctacttcattgcgttaggggtgctgatcgggggcgcactcatcggagggctcggagcatacttggcaggcgaacccccgcttacagccattacaaagcttgccaaccggttaaaaatatgggcgcttgtcgcagctatcggaggcacctttgatgcggtatacagctttgaacgcggcatactcgaaggcaatacgagagatatctttaaacagcttcttttaattatttcggccatggggggcgcgcaaagcggctggcttattatatcatggctgacccaggagcatctttcttcatgagggtcccccagcattacaaaaaaccgggatggcagcgttttttcgcgggaatgatgtgcggagccgtaatcagctggttctttttcctgtttacttacggaacattccaagaggagcaggtcagcctcatcgaaaagcaaaaagagcatgtaaaagacttgaacaatcaaatttcgatctatcaggaagacctccataaactgaatgaagataataaaagaaaactgctgattcaaagcgtcagcgtcaaattgctgaatggggataaatataaaatatcacagccggataaaacgaaattcgaggagcatgtaaaggatgatatttcagaggtgattacaaaagacatagagagcgtctatcaaacaaaggatctcttgaagcggacaattgaaaataaagtctatatgatcaatgaaaaaaaatacgaggcaaccgtcagagaattgattatttatacgaggctgacagtggaacttgaaatttctttcgccacataattatggattttttttaaattctccaaacttctgtcgctttttcccattcttttttataaactatatgtgaggcttaatggcgaaaggaaggaggaagggaaatggaggtttacagtgaccgtcagttagcaaaagatcaagcagcccgtctcagacaaggtttttctgcatatgccgaaacaaactcactcgcttccctcatcaaaaaagaacttcaatcacacaatctccaagtctacgaggaccttactgatttcggctgctggttcatccccgtcacagatgaacactaagagagagggtctcccctctactcgtgttctttacataatgtttccagatcagctaaaatacgatcagcttcatcccagctgtaaatagaggcgcctgaagctaacggatgccctccgccgttatatttccgggcaagtccgttaatgacaggccccttcgaacggaatctgactctgatttgatcgtcttcttctacgaaaaacacccaggcgcgaatacctgagatattgccaagcgtcccgacaagctgcgacgcttcagaagccgttgtgccgaatttttcaagcgtatcctttttgatgaaaacagaagccgccccgttttcggacaaagacacattttgaaagataaagccgttaagcttcaccacattcagttttgtttcatacaattgattaaataactctgaggaagagaatggatactgaatgagctcgcctgcatattttagtgttttttccgtggtattcggaaataaaaagcgtccggtatctccaacaatgccggcgtagatcagctctgccgctttcgtattcagcttccagccgtgctcttttccttctaaatacagctcgtaaatcatttcacttactgagctggcgcttgtatcgacccagagaaggtcaccgtatggatcttcgttcggatggtggtcgattttcattagtttggcgcctgaaggataacgctgatcgtcgattctttcctgatttgccgtatcgcagacaatgacaagtgcgccttcatatgtttcattgtccacctcatcaagggaatataagaaagagagggacggttcaggcgtgccgaccgcaaaaatatttttttcaggatatgtttcacgcaggatttccgtaagcccacactgtgatccgtaggcatccggatcaggacgcacatgtctatgtaagataatcgtgtcatataatgatatggttctgatcaattctgttttcatttgatactcctttattgtttttattcattaaatcacattctctgccgacggaaaagaaaaataacgtcaaaaccaagcccgtttttgtataaaatggggttgtaaacttttacgatggaggatttcatttatgctggttcttgtttttttgattgggctttcagcctgcttttatgtgtactataaagtaaaaggcgtacgggcaaagccatctttggcaaaagaaatatgttcagcaaaatcaagcatggccttagggtcactagtcctgttctacgggcttaaccaaatgatattattccattcagtattaacgttagtaatcggcggtatctttatcgtcataggagcaggaagcgcttgggcaggttataaagccttcaggcattacaatccccttcacgccaaagaagctgaaagagatcacgcgtaaggggcgcctgaacgtcccttagcttctttccatcagctgaaccatcagcatcgctttagacacgatatgaccttggctgtgcacttccacttccattttcccaaactttctgccggcctccaagatgcgaggtttgacttcgatgactgattccatctgcacaggcttcaaaaagaagatggtgatgctctctatgacgagttcgccgcgttttttcgagcgcaaaaatcggtttgccgcttgcgtcaaaatggtcgtaaatacgccataagaaatggttccaagctgatttgtcatttgcggcgtgacttcatactcgtaaaccgtttgatcttctttatcatcaccctcatctttaaacccccttgaaacgatatcatcaagcttctccccgacctgcggctgcttttgaatcatttgaagagctttcaatacgtcttggcggctgatcatgccgatgagtttttggtggccgtcagtgacgggaagcacttcgatcccttcccataccatcatttgcgcagctgaagcgacagatgttttcccaataaccgtgacgggatttttggtcatgactttttctatagatgcatttcggtcatggccagcaatatcttttgatgtcagaatgccatggattttcatttgatcgtcgacaaccgggaagcggccgtgccccgtttcaaaatttttctcataccatttttcaagtttatccttaggcgaaagatataccgtgcggtcagcaggtgttaggatgtcctccaccaaaacaatttcttttttgatcagctggtcatatattgcccggttaatcatcgcggcaactgtaaaggtgtcatagctcgtggataaaatcggcagttcaagctcatctgccagctgcacaatgctgtcatccgtgttaaagcccccggtcaccaatacggccgcgcccgcttcaagcgcctgcctgtgtgcattgattctgtttccgacaatcaaaagattccccgctgcggtgtaacgcatcatcgcgtcaagctccatcgcgccgatgacgaatttattcaatgtcttatggagccctgccctgcctccgagcacttgtccgtctataacatttacaacctctgcataggtaagcttttcaatgttctcttttttcttttgttcaattctgattgtgcccacacgttcaatcgtgctgacaaaccctttattctctgcttccttgatcgctctgtacgcggttccttcgcttactttcatttcctttgcaattcttcggacagaaattttttcaccgacaggcagtgaatcgatatacgttaaaatttgttcatgcttcgttgccaagcctttcacctctaaggacagtcttcttgtttttattataaggtttcaaaggatttatacgcaatgaggctggaaaataaaaaagaagcccgaccggcttcttacagcgttgatttcgttccagtcaaacgcaaggaccacgtgattccttttacatcgtaaagcggaaaaacctttatttttcttttaaatggacatcaaccgctgtcttaacaatatttcgattccctattttagataaaacaaataaaactgcggatagccatatcgcccctatggccgtatagatcaatggatgaacagctgtgtttgcgatccattcatttattaatgttctggcatttaccagaataataaatcctcctacaagcacacccatcaattgcggatgaaacttctgcaccagccatgctgcgataggggcagcgataattccgccggccattagtgaaaacacccataaccaattgacgtcctcccatcctaatgaaataagaaaaccggcggttgcagatacggcgatggcaaattcacttgtgtctacagtcccgacaactttcctcgggctcaagcctttgcgggataataaaatcggagtggtcaccggtccccagccgcctccgcctgtggcatctgcaaaaccagcgatcactcccaatgggatggattgttttcggtttaacggcacatgcttcttctcaagagccggcttatattgaaataaaaacctgatcaatacatatccgcccagaaggagcaaaaacaaagaaatatagggtttcgccacatctccaggtaattggctgaggaatgccgcgcctaaaaaagcgcctatagagccgggaatgacaagctgataaacggtttgtttgtcaacattgccaaatttaatatgcgacactcccgatgcggcagtcgttacgacttccgctaaatggacagaagccgaagccacagcaggtgtgatgccaaacgccaataacaaagaagttgaggtaaccccataagccatacctaacgaaccgtctattaactgcgacaataaaccaataaatgcaaaaacgattaatttcttcatcagaacaccccatctatatcaatcagatatttttgactcttcattcgaatctaacaatctcttggcgctttcatataaaaaataagaggctttgataattgcagtttcatctattgtaaatgcagggtggtgccaatcatgatcaccgtctgttccaaaaaacgcaaaggatcccggaatatgctcaagataataagcaaaatcttcccccgcggttgatggggcgggatcaatgacttgaagtttcgctttatgtgcagcgtctcgcaccagccccgtaattgcctcatcattacaaagcggcggcggtccggaatgccacttcacatttgcctttaacgagaaagcggcagaaatctgctctgtgactgcaaaaaaacgctgtttcacttgattacgaacctctgaatcaaatgtacgaacagtgccctcaatgaccactgtatccggaatgacattccaagtgctgccgccgttgattttccctacggttaaaatcgcgctttgcagcgggtttacatttctgcttacaatcgtttgcagggcgacaataagctgagaggcgccgataattggatcaaaaccattatgcggcaatgctgcatgagcacctttcccttctatctctactttaaatcggtcaacagcagccataagcgggcctgtttttaaccctacagtcccaaccgcgatatccggtttattgtgaaggccaataaccgcatcaatgccatccagttggccgtcctctatcacttttgtagcgcctgcacccgcttcctctgctggctgaaataataaacgaatctttcctttcagactgtcttgattttccttcaataaaaaggccgcaccaagaagcgctgccgtatgaaaatcatgaccgcacgcatgcatgatccctttatgtttagacgcataaggcaatcctgttttttcttcaattggcaaggcgtcaatatcagccctcaaagcaatcgccggaccttctgactcccctgctatgtctgcgaacacacccgtttttagagcagtagggcgaatctgtatccccttttctttaaggcatttttttataaaagcagttgtttcaaattcttcttttgacagttcaggatattggtgcaggtgccggcgaatgccgatgagctgcttttctagcgttgagagatttacgggattagactcctctttcaacgtcaggatgtcatttcctgtagtctgatatggataggagccttctatatttctccaataatccaaagacatatgttccgctcctttccctatcccaatatattttcttcagactcttcaacataagatgaaataaatcggttcaatttatcagcaagaccgcccgccccaaatcttatatacttgctggaaactttcggattatcttctttcaaaaagcttaaaaaagataaaatataaatgcgcctgtaagctacttgtgtaattccgtactcaaaaaaccagttatcaatgacattgtatacgcctcggttgacgccatataggttattacatttcttgtaaaagcagagatccggaagatttaactcctgatgggaaagaaggctttcttttttgtttggtgccataatcccaatcagctcaaagcgttttgcaacgcacgaaatatcctttttaatttgctttgttaaagactccaaagaatcaaaccttctttcttctctaattttaaagagaatgctgcattcgattttttctccataaatgtctctatgaaagtcaaacaaaaaaatctccaatgtcttttcaaggttagagcccaccgtcggtttcacaccgatattcataacccctaaatgaaattgatgattgactgtcgccagaaccccataaactccattacgcagcccatgtatttttgcatctacatttgccgtggggaatccaagctttctgcctaattgttttcctttcacaaccgtaccggcaatgatcgtcaaaaaagtcagcctcctctctcagcttccgcattcgatcagacgaaacctaatgatgtgatgaatgtaaaacggattgatgctgcggaatgccaagaccgagattttcccgcaatgtcccgccgcgataatcttgacgataaagccctctttcttgaagaatcggaatcaccttttctacaaaagcatcaagtgttcccggtatatccgacccaacgataaacccatccgccgcctcagcgttgaaccaagtttcaattaaggatgcgacacgctctggtgttccgatgaatagagtccgtggaaaagccatttcctgtgctacctcccgcaatgtcagatttctggcttttgcttctctcttaatccggtctgttgtgctttgaaacgcattctttcccacatcgccaatatcgggaaatggctcatccaacgggtaaacactcagatcataatcatcaaaaaaacgggccaaataagtaacagcattttcaatcggtatcaattctgcaaattcacgatacttcttttccgcctcttcttccgtatctgccacaatcgggctgatccctggaaaaatccgcacacttgaaggatcacgcccttcatcagcagctcggcttttcacatccgcataaaacgcttttgtctcttctaatgaattggaatgggtaaaaatcgcatccgcatttttagcagcaaactgccggcctgtttctgatgaacccgcttgaaacactacaggctctccctgcttagagcgcccgatattcaagggcccctctacttgaaaatactttcctttatgattcaggcgatgaagcttcgcctgatcgaaaaactgccctgttttcttattgtgtataaatgcgtcatgctcccaggaattccacagcccgcgcacaacatccaaatgctcttgtgcgatctcgtaacgttcagtgtgttctggcaaattagacttactatggttgcgcgccgctccttcctgcggcgaagtaaccagattccagccggccctgcccccgctgatatggtccagcgacatcaattgtctggagatagtgaatggctcagtaaaagatgtagagaacgtccctactaaaccaatatttttggtaaccgatgccagcgcagataaaatggtgatcggttcaaaacggtttaaaaaatgaggaatcgatttttcagaaataaataagccgtctgcaatgaaaataaaactaaacaaacctttttcagctgtttgcgcctttttcatgtaaaattcaatattcgtgctggccgagggatcaacatcgggatgacgccagccgtcagttgttcccccgacaccgtgaatcatggctccaaactgaataaaatctgcacgtgtcatctttttgcctcctttatctgtgcatgattagcaagtgcaagatcaaggtgttcaatgccgatttcagttatcccttgatactgattgccgcgcccgatttcgaccacaggcacatggcgcaccccatatttcacctgtaaaatatcccgaagcttttctttctctgaaacatcgatattttggaacgggaaccctttttcattcaaataattcttgacttcctcacaatacgaacagccttttttactccaaaccacaatgttcacaacatcactcattcttctgtccctccttaacgttttgcagctaaaactgcatcgctcagcagctgataagacagctgtttttctacagcatttttgatcggtgtaaaaataacaaaatcattgattttgtatgtgcctgataaacgtgttaattcttctgccacttcttcctttgttccggcaataatcccggttttttgcacgatgatgtcatagggctctgtgacgttttccagataggcctcagcctgttcgcgggaaccgacgttgaccttacgcccgtctttcaaaaccacttttatcgattcacgcgacacaatatgtttttccgcttcttcttttgtatgtgccgcaaaaacagcgggggcaagatgaaattcagcctcagatcctggcgggagatgcgcgtcaaatgctcggcgggcttccttcagcacttcctcttcaccgttaataaagtaagcaaagacaaaagagattcccagttttgcagcagaaatggcactctctgtgcttcctcccaatagaaaaatacccggcttccgatcaacctgcggcctaggacgcaatgcggcatagcggtgggtatcaggaaaatcatcccgaacgaaatgagtaagctcctccagtttttcatcaaactgacgcaccggttttttatattcggcctgcagcgcgtctgtggacagctgaaacccgccgggcgctttgcccactccaagatctatacggccgggagctaacgctgatagaagatggaattgctccgctactttataagagctgtaatgctgcagcatcactccgcctgatgctaaacgaatttttcttgtgcttgcagcaagatagcctaaaagaacctcgggtgcagaccctgcaatctcatcattgttgtgatgttcggccacccaaaatcggtgatatccacattcttcagccatttgtgccaatttcactgtatgctgtaatgtatcagctgctgtctccccttcaccaatcaagctttggtctaaaatacttaagcggatcatatcaccggctcctttatgtgttcttttggttcaaataaatattccggcgaaacacggcggagaaactgcctcgttctgtcttttttggtatggcggaagacttcctccggggttccttgttcaacaatgactccttcatccataaaaacaacttgatcagagacccttcttgcaaactccatttcatgtgtaacaacaatcatggtggctccggttttcacgatttccagcattacctcaagcacttcaccgaccagctccgggtcaagcgctgccgtcggctcatcgaacagcagcacatcaggatgaatggcaagcgcccttgctatccctaccctctgcttttgtcctcccgataactgactcggataagcgttcaatttatcttgaagcccgacctttctcagttcattttccgctacggcatacgcgtcttgttttctcattttccgggcaatcgtcaagccctccatgacattttcaatcaccgttttgtgagcaaacaggtggtattgctgaaataccattgccgtctgttttctgagccagtgaacctcttttttggacggaaagcggcaattaatcactttgtcatgtatagaaatgatcccttcgtctggacgttctaataaattcaggcaccgtaaaaaggtggttttccctgatccgctcggcccgataatcgtcacaacttctcccttgcgtaccgtgagatttatcccttttaatacatggtggatgccaaactgtttatggatatttttaatctcaatcataaagtgcctccttgaaatctggctgcctttctctctaatactccatttgcggattctaggattagagtcagcacccaatagataatcgctgctccgataaacgcttctaaaaatgcataattatcagaagcaacgatagtcgccgtccctgtaatctctgggacagccactatagccgcgatagaggtggtatgcaaaaagccgatacccaaatttgtgaagtttgggatggaaaccttcagcgcctgcggcaatattacacgccgaaaggtttggctgtatgtcaagccgattgaataagccgcttcgacctgtccggtatccatcgccagaatgcccgaccggatgatttctgtgagataagctccggcagttaaagacaaggccatgatgacaaacatggagaccggtatctcattagcggaccagccgagatgaaaaaaactgctgacttgatctgcaacaggcggtatccctaaataaatcaacataatgtgaagaattgcaggtgtacttcgaaagaaagacacataaaaccttgagcaagccaccaagcccttaattctaaaaattctaacaattatatttccaagagccacgagaaatccaaacacaatcggcaaaacagccatcatcaatgtcagaggaatggtctttaccatttctttcatggcggaaacgataaatggaaagtcaaattgcaatcttctcccccctcatccgaagaaatatatcaatgtatgttcatgtcaaaaacagtaacaatccttgtttgattcttcttgattcgtttttctgccactcgaaagaaccattcgaataaaaccgctacagcataataaacaatcgatagcgcaatgtaaacttcaagagaatggttgcttgaggtaatcagtgtttggccccttccggacatatccataacacctattgaaaaggctagagacgtatcttttaaagaactgatcaccatgtttcccatattcggaaacgcctggacaagtgcctggggcagaacgattcgcctgaaggcctgactaccgcttaagccaatactgtacgccgcttccgtttggcctttatctacactgcccacccccgctcgaatgatttctgcggctgccgctgcattgcttaacgcgtaggttgcgacagcagcataaaacgggtccatttttgatgtatcaatcccgataagccccgtaagcgccgggatcccgtaaaacacgatgaaaagctgcaccatgataggcgttcccctgaaaaacgagatatacacttttgccaattgatttacaattggaatattatagatgcggggcagtgccagaaagagtcctaatacaaaaccgaaaagcaaggacagtgttaaaatgtataatgtaaccggtaaataagcggttaacgtcggcacaaaatctccaatcatgttcatatcaaacgctttttccatcactgctccctctctttttacctaatactgctctttggaatagtcgtcaccaagccatttcaaactgagccttttcaacgttccgtcatcaatgatttcctgtaaggctttatcaatatcgtcacttaacgtttgttcatttttgttaaacataaaatacactttggcatttgaaagcacattaccgacggttttttctttaatagtgctcgtcttgttttgaaagtctactgcaaaaggcgttgagatcgttgcgtccgcacgccccgatttcagctgattcgcagtctcatttgcgccttggccctcataggcaatctcaaacggccgtccattatcctcattccattttttcagtacaagcgctccgttggaggttgcactcgtaatcacccgttttccttttaagtcttcaattccacggatcgtatcgttattttgaagcacagtaatttttaaaggaaaatggttgtaagcaaccttgttaaacagaaattttttctcacgctctttgcttttctccatttgatgtgccacgatatcgactttatgctgtccgaggctgacaagcaggttggaaaattccatcgttttaaatgtgaatttataatgtggcaggcgcttatcaagctctttgatcagttcgacatcataaccggttaaatcgcctttttcatcgataaagcaaatattcggaaattgggttccagttccgaccgtgatcgtctgtaccttcttttgcccggctcccgtcgtttgactgcctgcaccgcaagctgacagaactgttataagcgaaaataatattgccatgaatgctgttttcgttttcatctcatcgccccatttatttttcaaaacttgattttgaataatctgccccgagccattttcggcttagtttttttagcgttccgtttttctccagctttttaatcgcttgatccgtgtcatccgccaaggtttggctgcctttattaaacataaagtacacctcggtatctaataacacgtcaccgactgtcttttggcggaaggcgtgcgttttattctgaaaatcgacggcaaacggtgtagctatcgttgcatctgcgcgcccggtttcaatttgattggcggtatcattgcttccctgtcccgcatatttcaaatgaattgggctgccgtgcgttttgttgtactttgtaatataatctgccgcatttgacgtggcgccaactatgactgtttttccgtgtaagtcttttaatgtatgaatcttgtgattatcctctttcaccgtgatgtacatcggcgagtagttatatgggactttatgatacaaaaaacgcttttctcgttctttatttttggccatattgtgcgcaatcacatcaatttttttatttccgagactcgtcagcaaatttgagaaatccatcgttttaaattcaaatgtatattgaggcaactccttatcgatggctttcatcacttcaatgtcatacccggtcaattcacctttttcatttaaaaacgcaatattcggaaaatctgttccagtgccgactatgaccgtttgagcctgacgatctgttttgttatttgtttgcgaacatcccccgccaagtaatgcaaacactgacagcagcaaaaccaatcctttacgcttattcataggctgcctcacatcatgcccagctgggcgcacctaaaagcgttgggttaaatcgttccggaatcagaaccttgtgcatcatcacacctatgtccccgtctttttcctgctcaaaatacacttcataccctctccttctgtacatgtcagcaagccaaggatgcttgcgcgccgatgtgccgagtgtcagcgcaggagccttcagcatatctcgaagcactttttcttcaacatacgtaagcagcttacttccggcgccttgccctttatattccggcagtgtcgcaaaccaccacacaaatggatattttgaaggaggcgtctcactctcccacgggaacctgattgtaatcgttgaaatcagcttcccatcccgctccagcacaatcgctgaatgatgttcaatattttctgataccatttggatatcagctctcgtggatggccaatcaatatccagctgccgaatgggctgaaatgcgctgttaaccagtttcaacagctccgatgcatcttcaacagttgccagtcgaaaaatatcatcactcatttttgtcactcctcttcacaaaatatataattcctatttgtttactaagcttttattgtttatactataaagcatactctgatctttgactaatcaaaaaaagtaaaccttcacttcagtaattttaatgatgaaaaacaggagggagcacattggagttacgctcaatcaaaacgtttcatacgattgtaaaatttggaagcttctataaagctgcagaaatactcaactactcgcagccgacgatatcgatgcgtatgaagcaattggagcaggatttaggcgtactgctgtttgaaagaggaaaaagcctgcagttgacaaaagcagggaagcttttttatgaacgaacaggagatcttttgatgcaatacgaggcgcttaaacacaacctctccgacttaaaggaagaagaggcaggcattatcaacataggggtttcagagccaaccgccagtctgatattccccgagattttaaaggatttcttaatggattacccaaagataacggttaatatcaaggttgatgacgccaatacctgcagtcaaaagctcttagacgggacgattgattttgcagtctgcggcgagccggagctgattcttgaaaattactaccatccatttttttatgacacattaaatgtgattgtatctgatcaacatccgctcgctgagaagaaggctgtccatttgtctgatttagcagaagagcgcttcatatttacgcccgccaattgccccattcgcttacaaattgaacagcatttacatagagaactcgggaatcgctacaaaaaaatggagctcacaagcagcatgtcacatgaatattacgtacgtgaaaacatcggaatttcaatctttaccagcaccgcacattctaaaccgttcaacggcactaaagtcattccaattctgaacctggatatcaccccgcccatagggctgttgacaaatcaaaaagaagttcattttgaccgcgccacgaaggacttgatcgcccggataaccaaacgttttcagcagcgcagcaaagaattggaaggaacctctgataagaccattacaggataactgaaaaaataaaaaccacctcctgattcatcaggagatggtttcacggtttaaagctcgatcgtctcaccgaccgacatgactttgccgactccgcccggcaggctgtcagcgaatgcttctgggtcttgttcgatgaccgggaatgtattgtaatgcaccggcacgacctgttttgcgcgcagccattcagcagcaagcttggcgtcttcaggccccattgtaaagttatcgccaatcggaaggaaagcaaggtcgatatgattcaattcgccaatgagtttcatatcagagaaaagtgccgtatcgcccgcgtggaaaatcgttttatcttctacagtcagcaaaataccggcaggcatgcctgtgtaagtgatcgttttgttttcttcatctgtgatggctgatccatgaaaggcctgtgtgagcttcacttttccaaaatcgaactggcgggagccgccaatatgcattggatgaacattcaagcctttccagcctaagtacacagcgagctcgttcggggctataaccagcgcgttattttgcttggcgatttgttcagtatcaccgacatggtcattgtggccgtgcgttagtaagatgacatccgcttttacatcctccggctttatatccgttaatgaattccctgttaaaaacggatcaaaaataatatgatggtccttcgtttccactgtgattacagaatgtccgtgatatgtcactttcatttctttcacctcgtcacatgattttgttttttttattttccctttttaaaaagctgaaaaacttatgttgtttgattcttgttaatgacattgaggcctccggtggcttcaatgacagtccctgtcacaaggtctgagttctcctcacacaagaaagcgataatcctggcaatatcctcgcctgtaccggatcttcctatcggcgttttttctttgccgattcgcattctggcttcctctatcgatgcttctttcatgtcgccgacaatgtctcctgggcaaaccatgttggcggttatgccgaattcggcttcttcaatggcaattgtcttcgtcaaagaagccaagcccactttcgcagcgccaaatgccgatcggtgaagccagccgggcgcgtgagccgcaccttggaatccgtacgtaataatgcgtccaaattgctgttttctcataataggaataaccgctttgaataaatgaaagacggcgcttaaatttccttccagcatgccataccattcatcatcagtataatcggctaactttttacgttcaaatatgtatggtccagcgttgttaatcaaaaagtcgatccttccgaagcggtttaaggcagcctctgcaatacgcagcagatcttcttttttggtgacatcaccttttacaaattgcagccggtcaagacaatcgggacaggcttccttcaggcggctgactgcctcctcatcctgtctgtaattgactgttactgaatacccctttgcaagcaacgtttcagtcactttgcggcctaaacccttcgaaccggcagtaattaaagcatgtcgcacatgaatacctcccaaagcaacgtcgccgctttcaataaagtgtttcttcttctactttactataaaaggcttgcaatatcactttttacactttggcatacaaaaaaagctgcctgtacagacagcttattctgcaggagatgaagactcctgatcaggcatatcgacataaccgctttgatatgcttctgaaatgagccttgttgtctcctggctttcttgttcatcataaatatagcgttccggttcttttttcatcattctgcctcccatcattatagaggtaggttggctataatgacgggattttatgaaggaaattttaacaaactcctgctgccacgcaagctttcgctttttcaagcgcctgttccacctgtttgaatccggtgcccccggcgctcattcttttttcaactgcgtagtaagggtctaacacagtgtaaatatcttcttcaaatagtgtgctcgcctgctgaaactcgccaaacggcatatcgcttaaatagatccctctttcgatgcatgtgtacacaagtttcccgaccacttcatgcgcttctctgaacggcattccttttttagctaaataatcggccagttccgtcgcgtttgaaaagtcttgttttgttgcttgcttcatgacgtctttgtttacagtcattgtttggatcatgcctgtgaagatttgcaggctgccctccaccgttttcaccgtgtcaaacatgccctctttgtcttcctgcagatctttgttgtaagcgagcggaagtcctttcatgatcgtaaacagccccatcatatcgccgtatacgcgtcctgttttgccgcggatcagctccgccatatcagggtttttcttttgcggcatcatgctgcttcctgttgcgtacgtatcgtcaagctcgatgaatttaaactcctgcgagcaccataaaatgatttcttcagagaaacgggataggtgcatcatcagcatactgctgttgcttaaaaactccaaaatgaagtctctgtcgctgacgccgtccaagctgttttcataaatggcatcaaagccgagcagttccgctgaataatcacggtcaattgggaaggttgttcccgcgagcgccccgcagccgagcggagatttgttaatccgcttcattgaatcctgaaaacgctccttgtcgcgctcaagcatccagaaatacgcaagcagatggtgagcgaatgaaatcggctgggcgcgctgcaaatgtgtgtagcccggcagaatcgtttcaacgttcgcttccgccttttcaatcagcgcactttggaatgcctcaatcagctcgatgatgtggccgacatgattcttcaagtataaatgcatgtcagtcgccacctggtcattccggcttctgccggtatgcagcttgccgccaagaggaccgatttcgtcaatgagcattttctcaatgttcaaatgaatatcctcataatcgactgagaattccaatgctccctcctctgctttttgcaaaagggtattcaggccctctcggattttcaactcttcttctgctgtcagaataccgcattttttcagcatggcagcatgtgcgagagaccctgtaatgtcttcagcaactaaattttggtcaaatgatatggacgcgccgaactcgtcgacccatttttccggtgttttttgaaatcggcctccccaaagcttcttcatgctttaatctgctccttctttttcacgatgctgttcacttttgtcggaagtccccaaagctcgataaatccgattgctgcatggtgatcaaatgcatcgtcttttgtatatgttgcaagtttttcatcatatagagagtattccgatttacgtccttctacaattgcatggcctttaaacagcttcacgcggacaatgcctgtgacatgcttttgcgtttcttttaagaaagcgtgcagcgcgtcttttaacggtgagaaccataagccgttgtaaatgatttctgacattttttgctcgatgatcggtttaaagtgggctacctctttcaccagtgtcaaatcttctaattctttatgcgctttgatcagtgtcatcgcaccagggcattcgtatacttcccgggatttaatgccgacgaggcggttttccacgtggtcgatacgtccgacaccgtgcgcgcccgccatttcattcagcttcaagatcagctcagaaagcgagtaggaaacaccgtcaatggagacaggcacgccctgttcaaatgcaatttcaatcacttccggcgtgtccggcgttttttccagcggagctgttaaatcgtatgcaccttctggcggcgccgcccatggatcttctaaaatgccgcactcattggcgcgtccccagaggttttggtcgatagaatacgggctgtcaagattgatcggaatcggaatgccgcggctagccgcatattcaatttcttcttcacgtgaccactgccattcgcgaaccggcgcgatgacttctaggtcagggtttaatgatttaatggagacttcgaaacgaacctggtcatttcctttccctgtgcatccgtgggcaatcgcctgtgcatcttctttttccgcaatttcaaccagttttttcgcgatcagcggtcgagataatgccgaaacaagcgggtattttccttcatacattgtgtgggcctgcaaagagataagcgcgtaatcctgtgcaaattcttcttttgcatcgatcacgtaggagtttgtcgcgccgacttcaagcgctttctgctgaacaaatgccaaatctttgccctcaccgacatccaggcagcaggcgattacattatatccttgctcctgaagccattttattgcgacggaagtatcaagacctcctgagtatgctaatacgacttttttctgttctgacatgataaaaatcccctctcaaccgtgtttctattttgtataaaaataaattatatttaataaaaatacattttgtatgtatacactttaacaagtacgtttcgttttttcaagccttttataaaaaaaacttcacctaaatttcaggtgaagtttcatagtatttattcatttacttgtcttttctgatttctctgaccacatgcgcaagttcgggaataatcagcttattcattgccagctttactgcgccgcttgagcctggcgttgagaaaacagcggtatgctgaatgacgccggcagttgctctcgacatgattgcggcagagccgatatcctctgtataactcagcatcctgaatatttctccaaagccgggcagttctttcgaaaacagcggcgttatggcttcaattgtgacatcccgatctgctatgcctgtccctccgtttaagagtaccgcgtctgtctgttcatccatgcagcccgcaagcactgaccgttgcaaagcatccttttcgtcttttacaatttcatatgcggcaatatgatgaccggcttcttctaaaaatgagatcatcagcttgccgcttttatcggtttcatctgtcctcgtgtcactgacagtaatcactttgcaccgaacgatatcgggagcttcttgtttatgctcttgaacgctcattggcccacctcttttatgttttctgtctgtcactatcatgcatcaacaaaaaagcacattcaagagaatgtgctttcatgcgatttattttgctaaacgaacaacgtcgcgcgcaatcatgacttcttcatcagtcgggatgatcatgacttttactggagaatgcggatagctgatgaaagcttcctcgccgcgcacgttattaagcgcagggtcccagtatacgcccatgaattctaaaccgcgaagaacgcgttctctgacttccacactgttttcaccgataccggcagtaaagatgatcgcatctacaccgctcattcttgcagcgtaagaaccgatgtatttgtggattctgcttgcgaatacttcaagagccgtttccgcgcgctcatttccttctttcgtagcttcaacgatgtcacgaagatcgcttgagaaaccggaaatgccgagcagtccgctttttttgtttaatgtattcagtacttcgtcagccgtttggcctgttttctccatgatgtatgggatcagggcagggtcgatgtttccagagcgtgtgcccattgctacaccggcaagcggcgtaaagcccatggatgtgtcaatagattttccgccttcaacagcggcaatacttgctccgtttccaaggtggcaggaaatcaggcgcaagtcttttaacggacggccgagaagctctgccgcacgctcagttacatatttatgtgaagtgccgtggaagccgtatttacggatgccgaatttttcatagtattcatacggcaagctgtaaaggtaagactgctcaggcattgtttggtggaatgctgtatcaaatacagctaccgcaggaacatttggaagcacttctttgaacgctttaattccaacgatatttgccggattgtgaagcggtgccaattcagaaatatcttcgatttccttaatggtttcatccgttaataaaacagaatcgctgaatttttctccgccgtgaacgacacgatggccaattccgtcaatttcattcaagtctttaataatgccgaattccgttaacttattcagcagcattttaacagctaccgcatgatctggaatatcagttacttctgtatttttttcgccgttcacagaaattgtgaatacgctgtcggcgataccgattcgttcaactaaacccttcgttaaaacggtttctgaaggcatttcgaaaagctgaaatttcaaagacgagcttcctgcgttaattgcaataattttggacatgattgacgctcctttatactctgtatcaacaacttcgtttttcgtacttttttcccggtgaatatcaacatcttctccgaaaaatatctgacttttccatttaaacattgtcatgtcggcttttcaagtcaacttgcgtattgataacgcttacaataagaagtcgttattttcagacacattcactataggttttgtattgatgaacgcttacaatttgcggtttttccctctgtattttgtgtttcaaagctggattcaattcgtcaagtccggtcttcaaaagcataaataaaagcagcttaggcatcgacctcatacggctgtctaagctgcttttaaaacacttacttttcttttttaaaccattcatcaaattgagccatcatatcaagcatcgccttttgattggagaaagacggaagattcgcaagcagaatttgccccggcgctttcgtattctctccttgtttctgaagcacaaggatgcttttggcatgagcttcgtctttaaaaatagattttggcagctgcaacagtgcgttgatatgaaccttatctttgaaaaactgtttcagcttgccgctttgggagctctcaaacaaatgattcggaatcataaaaaataagtagccgcccggtttggtatgcttgacgctctgttcaataaacagatgatgagcgaaggaatggccttcgtcagctttgagctcaaacgcttctgctccttcgtcattcggataatagccgactggcagatcacaaatgaccgtgtcaactggatcgataaacaacggctcaaggctgtcctggtggaaaagctcaagctcttttttcagaaggttcgcttgggcataggcgatcttcaagagcacatcatcaatttcaatgccaaagctgtttgccgttttttcagacagctggttcagcacggtaaacagaaggttcccagttcccagggctggatcaagaatggtcagttcctttttgtccgccataaatttattcaccaaatagctgatgaaaagcccgatcgtatccggcgtcatttgtctgtttggatgcgagatatctttcattcctttaaggacggcaagctgaaaagccttgcgtacccactcatgctcatacgtgccgaattccgctttttcaagcagagcctgaagttgtttggttttctgatcagcaggcagtttcagctgatccgttttttcaagaaaatacatttctcctgcttcggccagcgcctctatatatgaaatctgcaattcattctttatcataatcgcggcttcgtttaacagctcatacaccgcacctacatggtctttttgcatattgtgttcctccttgccatgaaaaaagctccggcggcagcctggagcttttttccctgcttactttactaatgccttagcagcctcaattggcttttcatagttcgggtggtttgttgcttcgcttacatattcagcgtaaacgacttttccgttctcatcaaggacaaatacggaacgcgcaagcagacgaagttctttaatatacacaccgaacgcttcgccaaatgacatatctctgtggtcagacagtgtttccactttgtcaattccgttagcgccgcaccagcgcgcttgcgcgaatggaaggtctgcactgattgtgtagacgttgacatctccaagctttgcagcttcttcgttaaaacggcgtgtttgtgcatcacaaacacctgtatcaattgaagggataacagaaataatcgttacctttcctttcatgtcagctaacgatttttcttcaaggctgttagtcagcactgtgaaatcaggagcttgatctcctaccttcacttcttgtccgacaagtgtaaccggaccgcctttgaatgtaatttcagccattataattcctcccttttgtatgtatgtctctatcatagtaaagtttcctgcaaactgcaaagtttatgccaaaaaaaagttaactgcggccagcgcagttaacctttttttaataattcatattgttcatttggttttgattttggccttggctttggtttttgttatttttcttgaacatttgctggatgcgctcgagtgtttgaggggctgcgtctaaaattttctctattaaatgggtattttcatctaaatgaagcattctgatgcctgtcgatccgacaattaaaaacgcgatcggcgtaatggacacaccgcccccgcttccgcctccgaaaggaagtttctgttctcttgtctcatcgtcttccgatttcttttcggccggctttccgccaaactcgcttccgcctgcggcgaatccgaatccaactttagaaacagttaaaatcacacttccatcaggcgtttccactggatctccgatgatggtgttaacatcaatcatttccttcaagttttccattgcggttttcattaaaccttggatgggatggtctgccatatacgcttcctccttaaactgatgaatcattctttgaagtcattctagccgacggattcttctttaatacggatagctcccgtccgtatttgacgaatttgaaagctgcaagcatagcatgtccaaagcgaaaaaagaatatacactgaaaatgggtcttggaaacagggacttgaaacgacgggatcacctcatagacaggtttattcacaaagtccaggtggtcgtagagcattgctgcgataccgcccttcacgccccatacagcaccggttaacacacctgtcactgccgcgtcctgaattccgattactgtaacccattctagttttgtgatatgtaaatgcgcgagaaaagacgcgctgattttccgcagtctggtgacctgatgcaaaagcatttcgattttattaatgctttgctgcacatcgttttgtgtaatttttttctttccgctgctttttttcattttggattcagttttttgtttgatatccactgttccgtcttctttgttcaccttaatcgccgggattgtttttttgatccttataaggccaaacagcgccgtaatcttcaaggtcaatttgtcattatcatcggcatgaagatactccagcgcgacatggattttcattctgagaagcagtacgatccctatgagaataagaatggctgtcagtacatacaccatattcttcacttcctctaggagcattatcgccaattcctaaaaaaataaacccggacggaagtccgggttatcggttatttgcggtataatttttcatgcaccacggtggtatccgcgatgtaatcatgaatcccttgttttgtaggtgaaaaggcaacaacgatatataaaatccaaatcttatcaatataccgtccaaccacttcacgaaaaatcactgtactccatgtcagcttgctatcttgcttcacagaaaccactttgaggccgaacaccattttaccaagcgtctgcctgaagtattttgtcatgagtgcgaaataggcaagatacacaataagcgttgtcacactgtaggccgagaaggtaaacatgccggatgttttcggcagatccaatacggtaaagaggggagaaacgagcaaatggtttaatccccatatcacgagccaatcaagcaggaaagcccagaaacgaacccaaaagccagcataggcatgtgtcagcagctccgcttcttgcgggcctttgatgtcattgcgctctaactcttcatatgtcgcgtccattattgttccctcctacttcgcatagagatacatcattctcggcgaaccggattgcgatagaatttctctcatattcaaaaaatcaatttcacttttaaacattttgttcgcgcccatggaaaacagtgagcctaatccgaagctttcctcataagaaatgacagaggcgtttttcaaatccttgtgatcctttttcatggccgtaatggtatcgtcataaaaaccaagctcatcaacgaggttcagttttttcgcctgccgtccgtcatacacgcggccgtccgcaattttctttacctctgctttcggcatgccgcgcccttttgaaatgacatcaacaaagccttcatacgaattatcaaccatcgattgcatgatgtttttttcttctttcgtcatctcacgggaaggagacataatgtccttatgggccccgctcttaatcgtttcaaaagaaatgccaagcttgtcggcaagctttgaataattgacgctttccataatgacgccgagtgacccggtcagggtttccggtgtcgcaaaaatcttatcagccgctgttgagatgtaatagcctcctgatgctgccatcgaacccattgacacgtaaatcggttttttcgtttctttcttgatttcttccagtttcttatgtatttcagcactttcatacactccgccacccggagaattcaccttcagaacgatacctttgaccgtcttgtcatcttttgcgcgctcaaggttttttaagaacgttctgtggttatatccgtctgcaccaagcagactgcttgagtccccattatcctgaatggtgccgctgacctctaatacggcaattttacttgagggactgccgttttccagcgtcttctcctgcgattcatccgtcagtgatgtgagatccgtttgagcgcctttgacgctttcaaagaaactcatagagatgctgacgataatagacacgccgaaaatccccagagcaatcactaatgcaatccatctttttgcattcattttttctcctcctttttcctaaactctctcattatacgattcaatatgaaaaatgtttcacttcatgagaaagctccggcttaacgggctgccggcaaacgtggtacacttatggccaaaggtattttatcacaaatactggatggcagaaaaacttaaatatgacagcaaaggggaaatgggatatgaccgatcaacgccgtaatgtttatttttttcacaaacaggatcaggaaacgaacgaacaagcccgctcgttaacacaattagcggaagagcatggatttaccgttgtgaaccagcactcagacgccaatattatcgctagcattggcggggacggcacatttttgcaggcagtcagaaagacgaattttcgtgacgactgcttgtacgtcggcattaccaaaaaggggaaagctcatttatattgcgactttcatagtgatgagcgagaaaaaatggtcgatgcaatgacgtttgaacaaattgaagtgagaaaatacccgctgattgaagtgacagtggatcaagccagtccttttcactgcttaaacgaggtatccatccgctcaagcatcatcaaaacctttgtgatggacgtgctgattgacgatctgcactttgaaacgtttagaggtgacggaatgattatctcaacgcctacagggagcaccgcctataacaagtctgttgcaggagctgttgttgatccattgcttccatgcatgcaggtatcagagcttgcatcccttaacaataatacctaccggacactcggctcgccatttgtcctcagctctgaccgaaagctgacccttcgtgtggtgcaggacggcaacgaacacccaatcatcggcttggacaatgaagcactcagcacgagaaatgtgaaaacgatcgaaatcaaactgtctaataagaaaatcaaaacagtcaaactaaaggacaattcattttgggaaaaagtgaagcgtacttttttatagaaaataaaaggacaggctgctgcctgtccttttatgatttctcatatacaatctggccgttaatcacggtttttttaatctctaaaagatgaagctgtgcggggtcaatggcaaacggatcaccactgagaactgtaaaatccgcgtcatagccttccgcaatttttccgcgtgacttctctttataaatgataccggcgctaccttctgtataaagctttatcgcttcatatacaggtaaacattcactttcattatagcttggcccgttttgctcatgactgcttttccggaggaccgcggactggatccctagaagcgggtcaacaggctcaatcggggcgtctgaaccgcccgcgcataaaatgcctttagatatgagggttttccaggcaaatgcagtcttcatccggtcttttccgagacggtcaatgacccacggaaagtcgcttgcaacgaagtgcggctgaaggtcaagtgcgatcggcatgcgtgctgctctctcgattaattcgttatcaagcacttgagcatgaataagccgatcatgccggccgtttttgggcggatgcttttctattgcgttcagcactttttcaaaagcaagatcgccgattgcatgaacagcaacctccatccctttttctctcgctttgcgaatgagccggccaagggtttcgtcatcgtgaacctgaacaccatttgttgatggatcatcctgatatggttctttcaataaagccgttctcccgccaagcgccccgtccgcaaagattttcatagcaccgaactccacatacgggccggacagcttctccagctgctcccatcgatcgacagcttcatgatgaacgagcaaatggcagcgaaacggatactttccgccagcggcagctttctcataagctttcatcggcaccgaaacatcaccataataggacaagtcttccgaatgaccgcccgtcaggccttttgtccagcaatcctttattgcagccgttaatgcctcatcaacatagtgctgggagactggcgggacagccttcagaatcaaatcctgcgccttatcaaacaggagtccggtcggctcgccatttgcatcttttacgatgactccgccgtcaggatcaggagtatttcttgaaattcccgctgcttgaagagccgcagaattgacagctattgcatgccggcatatacgcttgagcaagacgggcctgtcaggaaacaggcgatcaagatcatgcttagtcaagtagtcaggtgtctcaaactgattttcattccagccttctccaatgagccaatcgtttttaggaagctgccgctctctttccttcgcagcctgtaaaattgaatctttcgacgtcagtgcggacagatcgagctgaagctgtttctcaccgtggccgatcaaatgtagatggctgtcaacaaaaccggggaacatcactgctccgttcaggctgatttcttctgtttccggcgacccgtacttttccttcaaacgttcatagctgccggtgccttttataacaccatcctcaacataaactgcctcagtccgatcgccttcttcgagcatcgtataaatgaaaccgccgtgccatatcgccttcattcacgttcactctctttctttacgcctttttattggctttgagctgttcttcacgttttcttaattccactcgtctgatttttgcagaagccgttttcggcaggctttccacaaattcaatttctctaggatatttgtatggagcggtaatcgtcttcacatggttttgcagcattttgacaagctcatcactgcgtttttcatgattttgcaggacaacatatgcctttacgatggagcctctgatttcatcagggcttgcgacaacagcacattcttttacttctgggtgcttaacaagcgcgtcttccacctcgaaaggcccgatcgtatagccggagctgataataatatcgtcatttcggctttcaaaccagaagtaaccttcctcatcttttcttgctctgtctcccgttaggaaataatcgccgcgaatttgtgttttcattctttccggatctttaaaatactctttaaagagcgcaggcgtactgaggtgaacagcgatatcgccaacctcaccaggtttgcagatttcaccgtcttcatttatgatctccacctgatttcccggtgtcggttttcccatgcttcccggtttaataggcgtatctttcaaaacaccaaccaaaagcgtgctttctgtttggccatatccgtcccgtaccttaatgccaaagtgcttttggaaaacatcaatgacttcacggttgagcggctcacctgcggaaacagcgctgtgcagggcagaaagatcaaagcgtttcaagccttcaaccttcgccattaagcggtattctgtcggagtgcagcagaaaacattgattttgtagcgatttaaaagctctagatatttttctgctttgaatctgccgtggtacacaaaaccggttgctccgctgccaagcaccgctaaaaacggactccatacccacttttgccagccaggggcagcagttgcccagacgatatccttttcagaaatgtcaagccaagcgccggcagaagtttttaaatgagcaaatgcccatccatgtgtatgtacaacacctttcggctgacctgttgtcccggatgtataagataagaaagccatatcatctcttgttgtgtcagctgttttaaattggcttccgtccgcttcaattgataagaggtttttccagccggcatcattttcaccaatagacagtgtaatcagtttgtcagccgtactgacatcccggaaagcgccaataaattcggagtagacgatagcgccttttacctctgcatgttcaatccggtattcaagatctttcgcgcgaagcatttcggagcacggaatgacaaccattcctgatttcaggatagccaaataaacagcataggcttcaagcacccgcggaaccattacaatcagcttgtctccctttttaaatccaagatcagctaaggccgctccgattttatttgtttcttccatcagcttttcatacgaccaagattcttgcttgcccgactcgtcctcccaaagaagagcggttttttgtccagcagcactgaacttttccatttcattcactaaattatattgcacaggggcaattaaatcttcacgttttaacacgaacaactcctcactttctccacccattatacataaatacaggctctttccgtaaggatatgcctaaaagcaacctctgtaaacatagattttataggccgctggtccttttttatatgtaaaaaatgaaaaagagtggggatacccccactcctaagccattatgtgaaattgtaaattagaattgtcctccgcccatgttttgttgagcaaaagatacaagacgttttgtgatctctcctccaacagaaccgttagcgcgagaagttgtgtctgctccaaggtttacaccgaattcagaagcgatttctaatttcatttggtcgatcgcttgagcagctcctggtactaaaaggttgttgctgttacctgagttattgttagccatgtgtctcacctccttgtgagtatagaatgtgtcaaaacacatggcttcattcagaaaaactttggtaattgtatacaggagctgaaaattgatttaaaagagttcagcgaatttatcgttagcttcttgttcgctataaagggtcattgtctcaatgttatctaccgcttcttgaatatacggctcgaaatcaacaaagctttcaaagtgttcaattttctcttttttagggcgtgttttcgggcttggcggtgtaaagatcgtgcagcagtcttcaaacggctgaatacttgtctcatatgtgccaatttcccgtgatttttcgatgatttctgttttgtccatggcgattagcggacgcaaaatcggtgttgacgtcaccgcattaattgcatacatgctttcaagcgtttggctcgctacctgaccgaggctttctcccgtaataatggcaagcccgtttctcttttctctgattctgtcggctatctgaagcatgaggcggcgggttgccgtcattgtgtaattttcaggaatttgtttttggatgagctcttgcgtttttgtaaatggaacaatatgaagtgtcatgcttcccccaaaacgggacagacatttcgccagatccattaccttttgctttgcgcgctcgcttgtgtatggcgggctgaagaaatgaacagcttctaccgacaatccccgtttcatcgcataaaaaccggccacagggctgtcaaaaccgccagaaagcatcagcatcgcttttcctgctgaaccaactggcagcccgcctgcacctttttcatcacgaattgtcaaaaatgttgcttcttccctgatttcgattctgagcgggatgtctgggttgcgaacatcgaccgtcaatccttctgtatttcgcaaaatatggccgccgatttcagcgttcatctggtttgtatctaattcaaattgcttatacgctctctttgtcgcgactttaaacgtatcacctggtttatactgatctttgatagcctttagtgcggttgccttaatatcatcaaggcggctgtcacacttaattgccaggctgaagctttgaatcccaaacacttgctttaaatgaggaaaaagagcctcaggatcctctccatttaatgtaatcgtcatacgatccctgttggaaaagtattttaaattcggatagtctttcaaaacgagtctgatgttttgttttaagcgctcaataaagctttttctgtttttgcctttggtcgaaatttccccaaaacgaattaatatatgatcgtaattcatgttctacctcatcatttcccttaattttttgatgccaggacgaagcgcgttcataaacggttctgccacatcgcttgtctggctgtaatttaaactgattctgatgctgcttccggcaatctgctctcctttgcccatctctaagagaaccttgctgggcttatgttcttttgccgagcaagccgatgttgtggagacgaatatatcctgttcctcaagcatgtgtaaaagcacttccgctttaatccccggtacagagaaattaataatgtgcggcgcgctattcatttgaggcgtgttgataacgacgccctcaatttcactcagcctattcataaacaattcctttacggcagtcatcgtgtcaagccgtgtgtcaaaatcagcagaggccagattaatggccttggcaagcgaaaccgcaccagcagtatgttctgttccggcccgtatgcctttttgctgagagcctcccgttatgagcggaataaggcgtgttccttcttttacaataagtgcgcctgtcccctttaggccgtgaaatttatgccccgaaattgaacatagatcaatgccggccttttcaattgccaagggcactttatagatgccctgcacataatcgacgtgaaacaaaatgttcgaatgctctttcagcacttctcctgccgcttcaatcggctgcacggaaccgacttcattgttcacatgcatcatgctgacaagcacggtatcgggacggatggctgcttttagatcttcaatagaaacaaatccgtcttcattcacagaaagataagtgatatcaaacccgaacaactctttcagctgttctaacgattccgtaacggatggatgttcaatagaagtggcaatgatatgtttgcctgtttttatctttgacaaagccgctccttttaaagccgcattattggcttctgtggcgcctgacgtaaatacaatatcatatttttttaggcctaaggaccttttgatttgatttttggctgcttgaagcagctgttccgtttcggctccatatcggtgcaaagatgaaggattgccaaagtatcggctgctcgtctgttcatatacgttcaagacttcatcgtaaggcttcgtcgttgaactattatctaaatatatcatcttttttactcctttatgaaagcggtacaaggtatgatatttatgttaccataacaaaatttaatagaaaattacgaaaaactagtattgacttctaatttttttaccatataataagatttgttcgtttcgtcatattatctgacaattaattgacagaatattttaacataattattaggaggatttttttcatgaaacactcactgcctgtcaaagataccattattattggtttcatgctatttgcgttattctttggagcaggaaatatgatttatccgccggaacttggacaagcagccggacacaacgtctggaaggccatcggcggatttttactgacaggggtaggcctgccgcttctcggcattatcgccatcgcattaaccggtaaggacgctaaaggccttgctgacaaagcgcaccctgttttcggcacaatctttactgtcgtgctttatttatcaatcggaccattattcgccatcccgagaacaggaactgtttcatatgaaattggcgctgttccgtttttgactggtgtaccagaaagactttctttattaatatttacacttatctttttcggcgttacgtactatttagcgttaaacccatctaaggttgtggatcgagtcggaaaaattctgactcccatcaaattcacaattattttaatcattgttctcaaagccatcttcacgccgatgggcggattgggcgccgtgacagaagcatataaaggaacaccggtttttaaaggatttttagaaggctataaaacaatggacgcacttgcttcaattgtatttggcgttgtcgttgtaaatgctgtaaaaagcaaaggcgttacacagtctaaagctcttgctgcagcctgcattaaagcaggtgtgattgccgctttaggcctgactttcatttatgtatcccttgcttatttaggtgcaacaagcacaaatgccattggtcctgttggtgaaggagctaaaattttatctgcgtcttcccattatttattcggttcattgggcaacatcgtactcggagcagcgattacagtcgcatgtttaacaacaagcatcggccttgtcacatcttgcggccaatatttttcaaaacttattccggcattatcatataaaattgtcgttacgattgtcacgttattcagcttgatcattgcgaatttcggactcgcgcaaattatcgcgttttctgttcctattttatcagctatctatccgcttgccattgtcattatcgttctttccttcatcgataagatctttaaagaaagacgcgaagtgtacatcgcatgcttgatcggtacaggacttttcagtattttagacggtatcaaagcagccggtttttcacttggatctttagatgtgtttctaaatgcgaatcttcctctttacagcctcggcatcggctgggtgcttccaggaatcgtcggagcggttatcggctatgtgctgaccttattcatcggaccatccaaacagcttaatgaaataagttaatgtcacagaacgcctgcgttattgcgcaggcgttttgtaataaaaaaagagcctgctcattacactgcgggctctttttcatggtcgtgattatctaagcggatatgtcagctttgattttttcaactgcacctggcgcagccttttctacagcggcagcggcaatttcataagagtcgtcataatcaaaagcataaaaacgtctttccgcttctttcagctgttcagataaaatatgattctggcttctgaaccggtttccgaactgaatgattttttcaatgaggatgacctgctcgacaagttcctctgattcccggcttgccctgttgacgatatcttctgcttgtttcaaatgggctccggcttcttccatatttaatggaagttcgtttagttgattgaccgtttcttgaatatgatgatgcgcgttctccagcatctcttgaatatggctcggaatgcctggaatgttgctagtcttcagcagtcttgctgtctcagaaattgtttttttcaaattgctgagcgtctccctcgcctgaagctcttcttttctcagcgcttgcagattttcacgatactcggcatgctcttttttcacttcttcaatttgcttctctattgaagcaacttcttctactaaaagtgagtaggcgacatgctctgcatcaagcttatctttaacggatgatagcagctttccaatttcatcaaggcgcttttcaaaagcctgctgtttgccgagctcaccggctgtcagcctgtagctttccttcaccagctcagtttccgctttcgtatgctctttctcttctttaagcttgtcgtaagcaataatcaattcaggcattttgcttagtacggattgaccggcttcaacttcgccctccagctgctgataaacagattgaatattttcgtcaatgagctgcaggattgcggacgcttcatcaatatccagttcagtcatcaggacatgttccgctcgtttcagctggtttgacagattttctaattccttatcaagctggatatgctcaagcttgtaccctttttctttcatttcgccatagccatccttgagctttgcaatctgtccgggcaccgtctgtttacagtcagctaacagcttcggcacatcatctatgtatgactgaagccgttcaagattgcggtcctgctcaagcagtacttttcgtgcagtaatatagtttccgccttctgtttcttcttcaaattgtttgatgccgctccaaatttcgtccagatccttttcaaggctgtcataaagctccccgtaaaggtggctgtaagccagcaggttttttcgagatttcgaatagcgctccctcacctgttcaatctcttcacggctcttttcctcacttgtgacaagatcgctgatttcccgaagaatcttttcaatgcttgattcagccgctgtcagcaggtcgtcgatatgaacgagcacttgattggcctttttaaaccggtatttgtctgcattttcctcggcatcataaaggagctcttcaactttcggcatgtgggctgtgacaatctcatcccattcttcacgccacttctcaaagaactcttctgtctgacccgtcatttttaaatgttttattttagacatttcttccacgatcgaccgattcagaatttcaatcttccacgattccagccggtcgatttcggcgtagatttttttcctgaaaaagtagcctgccgcaaacagcgcaagcagtacaattaataatccaatgacaaactccataatgagcccccttgctgtttaccttaatctgtcagggtgttttatttattcagaaagatttcaggatatgtattgagaaaaactgtcgttttcattgttattatgataccatgtaacaaacattttttgaccagaaatcaaaaactttttgtgcaaaatcggcaggatttgactattttttcatggggtgacatcaatgcaaaagcgagacggacatattcacacaccattttgccctcacggctccaatgacacactcagacaatatgcagaagaagccttaaaaaaagggttcgaatcgattacttttaccgaacacgccccattgccgccatcttttaccgatcccacgccgctgaaagacagcgcgatggcgcaagcttctttggaacgctatattcatgaaatttccggattaaaaaaagaatatcgcggacagcttagcatacggacagggcttgaagtcgattatatcgctgaatttgaagacgaaattacattattcctagacacatacgggccatatttagatgacagcatcttatccgttcattttttgcgcacagactcttcctatctatgccttgattatgacgagcataccttcaaagagctgatttcagcctgcggaagcattgaagcggtatatgaacaatattaccggagtatctattcttccattgtagcatctctcggcgtttataagccaaaaagagtcggtcacatcacactcgtccaaaaattcatcaagctgtttccatacagcatgtcagagcatattcgcggcctcgtttctctgtgcctgaatgccattgaagaaaacggaatggagctcgacttcaatacttccggcttaagaaaaacttacgctggcggtatttatatcgaggattggatgctgaatgaagcgaagcaaaagaagatcccgcttgtgtttgggtctgatgcccatcaagcgggagatgtcggatatgcgtatgaggcgtttttggaacggtgctagttggtgagcgccacgtctcctgtccggaagacgcttctgatccaaatcttgatttcttcaaaatacattttataaaaatacggctcgtgcggctgcatgtagagtacttctgaaatatattgaggctggagatagggcatcatcaagagagattttaattggagaataaaatgaggcagcggcagcgttaaatattcacgctgtttttctccttcctcaatgatcagctggaagatatacttttccttcattagatatgtcgacataatttccctgattaatgtggagtcaattgtgacttcccggtagacaaaacgagttaattgacgatgattatgctgataggataaaatatcgaaaaccaattgaagaagctgttcctgcgtgctttgagtagagatattgcttgccgctgtttcaagcgttttgctgtagccttcgtaaaactctgaaactaagtgttccatcaagcctcctttgcctttaaaatagtaggagatgtgcgcaacatttacatcagctgactttgcgatttcacggacagacgtgccagaaaatcctttttggttaaaaagcatgacagcagattcaataattttgtctttggtgcttactttcatacggctcactccttcctcttgatactattcaagcagaaagccgctgttcctgtaagaacttatcgacaaatgccggcagaaaagccggaactttgttttatattatagaaaaagtgagggttttccatgttccatgtcgaaaaacaatctggagataaagaaaaagactatcagcttctgctaaaacagctcgaagccatgaccgaagacgaaacagaccaaatagctaactatgcaaatgcctcagcactgctgtatcattcgctgcctgaagtcaactgggcgggtttctattttgccaaagaagaggatggacagcttgtgttaggtccgttccaaggcctgccggcatgtgttcggattcctttcggcagaggggtttgcggcacagcgtacgcaaacggaaaagtggaacgtattgaggatgtaaacgcgtttccgggacatatcgcctgcgatgcagcgtctcaatcagaaattgtgcttccgattcgtgtagacggaaaaattgtcggcgtcttggacatcgacagcccagtgaaaaaccgtttcgacgaaattgatgaaaaatacttaactcaatttgccgaaacgctagaaaaagcgttagcgcagtaatataaaagcccaaaactgatatcgttttgggctttttttattttattgagtcatgaatcatcaagcggtttttcccgctccgtttcgcgctgtagagcgcttcatctgcctcatgcacaagctctttcagcgacttttttgtttctgtcgtccagcaggagataccgcaggaaatggttacctcgggtttcgtattttttctgaccgcgtaaaccagtcgctcggtaatccgtttccccactgcaaccggcacatttggcaaataaatcgccagctcctctcctccccagcgggcaccgacatcatgctttcggatgttgcttttaatcactgaagcgacttgaattaaaatctcgtccccagtctgatggccgtacgtatcatttacatttttaaaattatcaatatcaacaagaataaaaacacccttttgatggattttcatgctgtattgaattttttcatctaaatacgctcgtgaatacagttcagtcagctgatctgttttcacgagatgctcaaggcggtcgcgaagcattgaattggttacagccagtgtcgcgtgatgaatcagcgcctgaaacagcttgtacatttcaaatgtaaaagcgtacagctcctgtttcaataaaaccgcaaagcctaaaagccggtcgttttgaatcatcggagcagccatcagcgagccgtaccccgccttcccaaaaacagactggccattcccgatgaaaacccctttttcaccttcatacagcttttctttcagctcattataaaaatctgacggcttcgcttctttaaaaaatgctgtgctgcctgggagcaatgttaggttttcaaaatggtctatatgaaaaaatcccacttcttctgcctgaaacgattctgccattctcacagccagatcattcattgtatcagtcaatgtcagccgctgattcaggcgtcgtgatgtttcattaatcaattccaaatttgcgatgcttgctttggattgttcgtagagctgggcattttcaaacgcttttcccgcggcgtttgctaacagcgacatttcatcaaggcaggcatcagtaagaaagctgtcacccgttccttcagccttcaacaccccgtatgtgccctgctgtcctttgatcggaatataggcgacagattcatttttccgcaaaatgtctccggacaaatacactttgagcgcaaaggaatcggatttttccccttccatatacagctcttttgcaggaatccctaaacattggtcttgatcgtgcgatataaataaagaaaactcaaaaagagaaaatgtgcttgtcaagctttctaaaagctgcttcagcacatctgtctgatcaagcagtgaatggaacagctctgtcattttgtatatctttttttggtagatcgttttgttatagagtctttcctgtttcatcgactggtttaaaaatgaagcaaccacgtccggaagcccttcaggaatctcttcatcctgcctgcacgcaagatggaaacgcctgccggagccgtcctcaatcagataacatgaagcgtttatttttgaagcggaaaaacgcgcttcaccatctgccagttttgtcacaaagtctgatggtgacggtgtaagcgaaacacaaagggttgaaaaataggtttgaatagccgaagtcagccatatgaaagagtcggtgaatgtgactttttcagatttggttaataaaaaatcgagcatatgataatgaaaggcggataattgatctttagtttgttctaccatgtttttatcacctaaaagtttaccactaatttttgtttattatatcataaacggtgaagcaataatggaggaatggttgacttcaaaacaaataaattatataatgacctttgtgtgaaatattgcagcctttttgttcagcttctatgttttcattttgttccttatcaataaggtgtatcgtgtaactctctgctgctggagcgaggatacatgaaaacaaaatgtgcatggtcgaatagagcagacggtttttattttccacaaaaataaaaccaaaggaggagtcacattatggctcgctatacaggtccatcttggaaactgtcccgccgtctaggaatctctcttagcggtacaggaaaagaattagaaaaacgcccttacgctccaggtccacacggcccaggacaacgtaaaaaattatcagaatacggtttgcaattgcaagaaaagcaaaagcttcgtcacatgtacggtgtaaacgaacgtcaattccgcactttgtttgacaaagctggcaaactagctggtaaacacggtgaaaacttcatgattcttttagattctcgtcttgataacgttgtgtacaagctaggtttagcacgtactcgccgtcaagctcgccaattggttaaccacggtcacattcttgtagacggaagccgcgttgacatcccgtcttacctagtgaaacctggtcaaacaatcggtgttcgcgaaaaatcaagaaacctttctatcatcaaagaatctgttgaagtgaacaacttcgttcctgaataccttactttcgacgctgaaaagcttgaaggtactttcactcgtcttcctgagcgttctgaacttgctccggaaattaacgaagcgcttatcgttgagttctactctcgttaatcgttttaaaaacccctgccgctatgcggtcggggtttttttatcggctttcgcctcttgctggccaacactatcttgcgcctgctgctcccaatgatcccgctgcagccgttcttttgcaatcgtacacatgagattcacgctttagcgctcctttcatttaaaaggtggtgattggtcgtgtttgccctatctaatatactcttttcctttcattcctatgcggtaaacaaaaagatcctttgccttcagtggcaaaggatctttttcttatttatacgtcacaaggaagtattttttcttcccgcggcgcagaacagtaaattggttttcgatgcggtcttcacctgatagggtataatttatttccgtctggcgttcaccgttaatgtaaacagctccgttttggatgtcttcacgcgcttggcgtttagaaggagataatttagattgcaccaacacatctacaagtgaaagctcttgggtgctgtcaacttccatagaaggaacatctttaaagcctacttttacgtcttgagcagaaagctctttaatattgccgctgaacagcgcttgggagatgttgatggcttgctccagcgcctcgcgtccgtgaacaagtgatgtcacttcttctgccaggcgtttttgcgcttcacgtttttctggcgccgtttctgttttttcagcgtatgcttcaatttcctcttttgaaaggaacgtgaagtatttcaagtatttgacaacgtcacggtcgtctgtgttgatccagaattgatagaattcatatggcgatgttttttctttatcaagccagatcgcgccgccttccgtttttccgaacttcgtgccgtctgcttttgtgacaagcggaatcgttaggccaaacgcttttgctccttcttcttctgattttctgatcagttcaagacccgctgtgatgttgccccactgatcgcttccgccgatttgcagtttacagtttttgtctctgtaaagatttaagaaatcataagattgaagaatcatgtagctgaattccgtgtacgagatgccggattcaattcttgagctgaccgtatcttttgccagcatgtaattgatgccgaaatttttaccaacgtcacgaaggaaatcgatcacattcattttgccgatccagtcaaagttgttcgcgatgacagctgggttttctgctgcttcaaaatctagaaatctggacagctggtttttgattttttgggaccattcggatacgatgtcagcagtgtttaatgtacgctctgctttttttccgcttggatcaccgatgaggcccgtcgcgccgcccacaagcgcaatcggatgatgccctgcaagctgaaaacggcgaagtgttaaaataggcagcaggtgtccgatatgcaagctgtctgctgtagggtcaaagcctgagtacaagcggattttttcttcattcagctgtttatttaacccttcttcatctgtcatttgctgaatcaatccgcggaaggataagtcttcaagtaagttagtcataagataaagctccttttttaattaaaataaaaaacgccccttcgtttacacgaagggacgattgattatcgcggtaccaccctactaataagagaatgcaaacattcgtcttatcactttgcctgataacggatcaggtccgttctttcactactgaaagcctggccggctttgtttgcaaaagcggttcatgagtgtattcgatatatccgtctgtgctgattttcaccggccatcagctctctggaacgtaaggatattctacttgtctcaatctttaccttttcatatgaagctatatcatttttaacataaataaaatcctgtgtcaacgccgccttttaatcctccattgttgacagatctccagccggcagattaagctcccatgccttcagcacgcgcctcatgatctttccgcttctggttttcggaagcttatctttaaattcgatctcacgcggagccgcatgggctgcaagaccctgctttacaaataggcggatctcttctttcagtttatcagacggctcaaatccttccctgagtgcaataaaggctttaatgatttctccacgcaccgggtcaggctttccgataacgcctgcttctgcaatagccggatgttcgacaagcttgctttccacttcaaatgggccgacgcgctcaccggaggtcatgatgacgtcatcaactctgccttggaaccaaaagtatccctcttcatccatgtaagcagaatccccagacacataccagccgcccggcatgaaatacgattcatacttttcagggttattccaaatggtatgcatcatggaaggccagccctttttgatggcgagattgcccattcggtacggcggtagctcgttgccttgattgtcaacgatcgctgcctccactcctggaatcggcttacccattgaacccggtttaatatccatgcaaggatagttgcagatgagctgactgcccgtttcggtcatccaccaggtatcatggattcgtttgttaaaaactttatgtccccatctgatgacttccggatttagcggctcaccgacactgagcacatgccggagtgaagttagatcatatttcgcagccatttcatctcccgctcccatcagcatccgaaaagctgtcggcgcgctgtaccagacattgacgccaagctgttcaatcgttccataccagctttccgggctgaaacgtccgccgacgatgacatttgtcgctccgttcagccacggtgcaaaaatgccgtataccgtacctgtcacccagcctggatcagccgtgcaccaataaatgtcttcttcctttaaatcaaggacccactttcctgtttgatattgctgaatcatcgcttcatggacatgcaacacgccctttggcgtaccagtggaacctgatgtatagtgaagcagaaagccgtcttttttatccatccattcgatatccaatcttgtgctttcctgtttcgctgcttcatcataattgatgatattcgtgccgctctcagcctctcccccgactacgaagacatgctgcaagtgaggcagtttgtctaccggtattctctccagcagctcaggcgttgtgacaacaacctttgcctcactgttttcaagccggtctttcaccgctccctccataaatgcttcgaacagcggcccggcgatggcgccaattttgattgcgccaagcataataaaataaagctcgggtgatctcggcataaaaataaaaacgcggtcccctttttccacatttccataccgtctcagcacattcccggctctgtttgattcttccttcatttctttaaatgtgtatttttcatccctttttgcgtctttataataaagcgctactttgttttttcgaaacgattcggcatggcggtcaatcgcttcatacgccgcattcagtttccctgtctcatgccaagagaaatgtttctctgcctcggcccaatcaaaatgccggtacgtttcttcatagttttttaagttatgatccccctctattgctggtaacgctttcaagttcatgcccaaacatccccctttgctgaagttgtcacaattattatagtatatattcatattcttctcaatttttaaaatataaaccatgttgaaaacgctttataatttggtattcttaaagaaggcatgtatttttgataagaattgatgggacggtgaattagtggaacatcataaaacataccattcagcaaacatcaaaacagcaaccggctctttactgatagaagggcctgtctctccagaggatttggcaggttatgagtttcataaagatttaaccgcatttcgcccgcctcgcgagcagcatgaagcgctagtcgacattgcaggccttcccgaagggcgcattattattgccagagacggccgaaccattgtcggctatgtcacgtatttatatcctgacccgctcgaaagatggtctgaaggaaatatggaggatttgattgagctcggagccatcgaagtagcgccggactatcggggatgcgctgtcggaaagacgctcctgaccgtcagcatgatggatgaacaaatggaaaactacattgtgatgacgacagaatattactggcattgggatttaaaagggatgaaaaaagatgtgtgggaatacagaaagatcatggaaaagatgatgaatgcaggcggattggtctggtttgcaacggatgagccggagatcagctcccaccctgcaaactgtctgatggcccgcattggaaaaaacgtcagccaagaatcaattgagcaatttgacaggctccgtttttatcatcgttatatgtattaactgacactgacaaaggggaaaaaataatgattgttgagcaaatcatgaaaagagatgtcattacattaacgaagacggatacgcttgaaacagcaatatgcaaactgaaggaattccatatcaggcatctgcctgttgtagatgaagaacgacacgtgatcggcatgattacagacagggacatgaaacaggccagcccgagtatttttgaagaaaacaaacgaagcctatttctcacacgaagcgtagattcaattatgaaaaaggatgttgtctgcgcccacccgttagattttgtcgaagaaatatcagccgtgttctacgagcatggcatcggctgcctaccagtggtacaccatcaaaaattaataggcattttaacaaaaaccgatttgctgcggacgtttgtcaaattgacaggcgctgaccagccgggctcgcaaattgagataaaagtaaacgacatcaccaaaagcctcgctgagatcagcagtctttgccaagaccttcaagtgaaaatattaagcgtgcttgtttatccgcatgacgatcccggtgtaaaagtgcttgtcttccgtgtaaaaacgatgaatccgctgccgtttttgcaggcattacaaagaaatggacaccacgtcgtatggccgtcagagcaaagggatctgctatgagagacagtgtatttatctattctccatcctaccaaacctatatgtttcatcaggagcatccctttaatcagcagcgggttctgttaacatatgatttgcttaagacgatcaatgcctttgatgatggagacattgtcacccccagactcgcttcagaagaggagctttcccttgtccacacggacgattacattcaggccgtaaagcttgcgggcgccggaaagctccccgctgaagaaggagaaagctacgggctcggcactgaagacacacccgtctttgccggcatgcacgaagcggcatcactcttggtcggcggcactttaacggccgcagactgggtcatgtcaggacaagccctgcatgcggcaaaccttggcggagggcttcatcacggctttcgcgggagagcatcaggattctgcatatacaacgacagcgctgtggctattcaatatatccagaaaaaatatagcgccagagtgctttatattgatacggacgcccaccacggggacggtgtgcaatttacattttacgataatcctgacgtatgcacgctgtccattcatgaaacaggaaggtatttattccctggaaccggtcagatccaagaaaaaggaagcggaaaaggatatggctattcctttaatattccgcttgacgcttttacagaggatgattcttttcttgaggcttaccggacagcagcttcagaagtcgccgcgtatttcgagcccgatgtcattatcagccaaaacggcgccgatgcccattactacgacccgctgacgcatttatcagcaacaatcaatatatacgaagaaatcccccgtcttgcacacactttggctcatcaatattgcggagggaaatggattgcagtcggaggcggcggatatgatatttggcgtgtcgtgccccgcgcctgggccagaatatggcttgaaatgaagggaattgacccgggtcacgagatcccgccggaatggattgttaaatggcaaaaacaatgccccgtggcccttccgtcgagctggagcgatccggctgatttatatcctccgattccccgcaagcctgaaattacagaaaaaaatgcccaaactgtcagcaaagcattatatgcgatacgttctgaacagcaaagaacaaagtaaaaaacgacctttacgaagaggtcgtttttgattttttaatcactatttccacacgccgattttccttcatgtgttcatttgtcttgttatcctttactggctttgtatccgcataaccgacagcaataaagcgcttggagggaagcttctctttagacgtgaagtattgaatcactccacttgcccgtgctgctgatagctcccagttcgacgggtatcggtatgtcgaaatgtttcggctgtctgtatgtccctcaacctgaatgtcatttggaattgtttgaagaagaacggcaatttggtgaagaagtgtttcggcatttttcagcacctttgcctcacctgtatcaaacagcacagcctcctgaagaacgagcacgacaccgcgttcatcccgtttggctgtcatttgggccttcaaatgattgtcttttatatatgtatttactttcttgagaagctgatcctgctgatcctcttgcttcttcgtatcagatggggatgtattctttttttctatggatgtttggtccggctgaagcccgttgccttccttctggatcgagtccactgccgctttgaatttttgcagatcgatttgggacatcgaaaagagtaaaataaagaacacaaggatcaaggtgatcagatctgtaaaggttaccatccagctggatgaagattgactgttttttccgcttccattccttctttcaaaacgttctcttctaagcttcatgtacagatcccttttttgtttttacttgttttggctgcttctgccattcttcccgtgagctgaaaacgaccagctggctttcaaggttgcgcgggttttttccggattgaacaccgataatcccttccaccattacctgcttgatgaaaatttcactttctgttttctcttcaagcttagccgcgatcgggttgaagaccatatttgccagtaatgaaccatataaagtcgtcagaagcgcaatggccatgtttggtccgagcatatgcgggtcgtttaagtttttgagcatcagcacaagcccgacgagtgttccgatcattccccatgccggagcgaattctcccgctttttcaaaaactcgccgcccttttcggtgccgttcctccattgctgcgatttctgaatccatgacgagccgaatcgtttcttcatcccagccgtcaatcgctaaaagcagcccttttttcaagaatggatctttgatttcccgagcctgatcatccaatgataaaagcccgtgttttcgcgcgtgatcggaaagggaaacaaaggttttcacaagatctttcacattgtcttcctggcggatgaatgcctgctttaacacagagggcgcttttttcagctcacttggcggaaaactgataaaaacagcggcgcaaagtccccctgttacgatgaagaaagaggtcagatcaagaaaagagcggaaaccgcttactcccgatcctgaaataatcccgataacaataataatcgttcctaacacaaatccaacaggtgtaagataatcaaaacgtttcatcatttctccccatgaaaaaagcaagaattcaccataaaggtgaagcttgctctttgtttttcttatgacttggttgactttctaagctctatacggtgcggcagttcgacgatatgctcttcaaccggctctttattcatgagcttcgtcagcagtctcatcgcaacggcgccgatatcatatgtcggctgaacaactgttgaaagctgaggacgaaccatgaggcttaatcttgtattatcaaaaccgataatgtcgagatcctccggaatggataagccctgatcctgagcggcatggataatgccgagtgccatttcatcagttgcagaaagaatggctgtcggttttttatccaggctcatcagatgctgcagtgcttcgagtccggaatcatatgtgtaatccccttcagctacaaattgttcattaaacggaaggttcgcttcttcaagcgcacgtttgtagccttggagttttttcgaacggttgatcggttctgccattggtccggaaacgaacgcgatgtctgtatgtcctttatcaaccaaaagcttcacggcatcataaatcgcctgttcgtaatcgatagcgactgacggtgtttcctcctgctcttctacagaagcggcaagtacaatcggcactggagaacgcttaaattccgccacatgctcgtccgtaatgtttccgcccataaacacgatgccgtccacttgtttgccgagcattgtgtttaacaagtgcagctctttctccatgttttggtcagagttgctcaaaataatattgtatttatacattgtcgcgatatcttcaattccgcgcgcaagctctgaatagaaaatgcttgagatatcgggaatgatgacacctacagttgttgtttttttacttgccagccctcttgccaccgcgtttggacggtaaccgagacgttcaatggcttccaagacttttttcctcgttgtcggttttacattcgggttgccgttcacgacacgggaaacggttgccatgcttacattagcttctctcgctacatcgtagatcgtaatattgctcatcctaaaaccactccttttactggatacacttatccttatctatagcataaacactttatgtagagaaatgtcataatgtccgaatttatgtcgtttatgatttgtaagcgtaagtcagtagtgtacattatttttcattattcatcaaatttaattacttctcatgaaattatacacgtttttatagatgatgaaaacgtatacttggtttttataactaaataaacgagaaagcataaaaaaaggccgcaggcgcggccttttggattgttcaattaagcgttgactttcaccattggcttcagttcattcagccatttttcgaattcaggaatcgccatttgctgagcagagtcagaaagtgcgactgacggatcagggtgaacctcagccattacgccatcagcaccgatcgctaaagcggctttagctgtcggaagcaagaggtcacggcggcctgttgaatgcgtaacatcaacaaagactggcaaatgcgtttcttgtttcaaaatcggcacagctgaaatatccagcgtgtttctcgttgctgtttcatatgttctgattccgcgctcacaaaggataatttggtcatttccttgtgacatgatgtattcagcagcattgatgaattcagagatcgttgcagcaagaccgcgcttcagaagcactggctttttcacggcgccggccgctttcagcaattcgaagttttgcatgttgcgcgctccgatttgaatgacatcaatgtagtccagcgcttcttcgatatgagccggagttacgatttcactgataaccgccagatcaaattcatccgctacacgttttaaaatttgaaggccttcaacaccaagcccttggaaatcgtatgggctcgtacgaggcttaaaggctccaccgcgcaaaattttaatcccttgttttttcgcagctgcagcgacttcagctacctgctcatagctctctaccgcacatgggccgacaatgaatctttgctggccgtctccgattttttcgcctttgatatcaacaattgtatcttcaggttttttcttgcgggagacaagcagcgctttgctgtgatcttcttcctgaagctctaaaccggctttgaatatctctttaaaaatgtgctggatggttgaattttcgaacggcccgtcattgttttcaatgatattgtttaacattgtgcgttctctgacagggtcaaatcggttgacaccctgtgcttccttcgctttaccgatctcttttacaacattgccgcgttcgttgattaattttaaaatttgtaggtttaattcgtctgctttctgccttaaaagctctaactctgtgttgctcatttttttcatcctttccctgcacattcattttttattttgtagttatcatgcatcttactataagtaattccaaatggaaatactgaaatacaaaaaattttataaaaactctactttattacccaaacgcttttaagtgataaagtaatctatgaagctatcctacatgatgtgagggcaatgttcaagggttttttacaaaaaaaagcgccagatgatatctggacgcttttttctatgacaaatgctgctcaatagcggcttctgtaatttgtgaatgtgaggtatgccatttcacttcaccgttctggatgatgaatatctgagggctttcatgcttgaccccatatgtttctgcaatgaaattggacagcggccgggcttcttgtacttgaagatagtaagccggcacatcctcatgctgatttgcaaaggcatcaaactcatgaaatgctgcctggctgatcgggcatgtggtgctgtgtttcaagaagacgaaaacgccttcctgttctgcaatccgtttaaattcttcctcagattgaataagctgtttagccatgactcaagctcttccttccctgctcagcgattcaactgctcagcctgtttttgtgcatctttcagttcgtcttttacatcttctttcgtctggaggacttgatcttttgtttcatcagctgcctgcatcgcttcttccctcatatcttgcattgcagtcgatgaatccgttttgtcagatttggaacggtctctcaaatcctttaccttgttcatgatctgtccagactgatccgctacaagctgtgtgatgttggaagttttgtcttttgcgatgctgacatattgcgtgcctttttccttcgcatctgccgtcattttatcagttttgtcccgtaaggcaacagcctggctgccgagatcgtcgcgaagttctttgcctgatttaggcgctagaaaaagagctgtagtggcaccgatgattcccccgattaaagttccgattaaaaaatctttactattaattccatctttgctcatcattattcctcctcttagtatttttttctcttacagggctgattttttcttttgcttccatttctcccaaatttccattgctgcttgactccaagtgacaacttgattgatcttatcttgattctctctaactgatgccgatacagaccctgccgcttgtttcatggatgtattgaactgctgtacagaagctcccactccttgaacagcatgaacgaccgtgttcagcttttctgatttttcctgaatatcttcagccaggcggttggtcttatgtaaaagctcggctgtttcagttgtgatgcccttcatttgtccctccagcccttcaagagtggatgcgacgttttttagtgtcagctgcagtgacttcaatgttttagacaagtagatcactaatacgagaaatgcaactgcgatgagtgcaacgctcaaataaagaataataatcatctcaaacctccttgctgcaggatatactgctgtttacccgttttcttcaatcataaacatgtgtactgggctgtatacatactattctccgttatgtaagaaaatcctttaataagctttcccatcagataaataaaaagcagtgagatcactgctttttattatgccatgacgttttcgtaggctctcatatatttttggatatctcctgctcccatgaagatgagaacggctttatcatgagcttttaaaacagatgtgtcatcttcttcaatcagcttggcattatgaatttttccctggagatcaccgatcgtcagctttccggcattctcacgggctgagccgaaaatatcgcataaatacacacagtcggcgccgctcaggctttctgcaaattcgtcaaggaactgctgcgtccgggtaaatgtatgaggctggaataccgcgacaatttcccgatcaggatacttctgtcttgccgcctcgattgtcacttttatttctgtcggatgatgggcatagtcatcaatcagcacttgatccccaagctgcttctcattgaatctgcgtttgacgcccccaaaggatttgagagcatgcttaatgatgctggaatcaatttcttcataatggcataacgcaatgaccgccaatgagtttaatacattgtggtggccgtacgcaggaatataaaacgtatcatagaacgtattgcggacaaagacatcaaaagttgtcccttccgtgctttttacgatgtttctggcttgaaaatcattttcttcccccgtgccataatacacaaccgggacgttcgcatggattttcggcagatgctcatcgtctccgcaggcaataatgcctttgttgacttgaagagccatctcttggaaagcgtcaaatacatcgtcaatgcttgagaagtaatcagggtgatcaaaatcaatattcgtcataatcgcataatctggctgatagcttaagaaatggcggcggtattcgcacgcttcaaacacaaagtattcgctgttttcatttccctggcctgttccgtctccgattaagaaagacgtcggttttgcgttttggatcacgtgagccagcagacccgtagtcgacgttttgccgtgtgcgcccgtaacggcaacactcgtgaattttttcatgtagtcgcctaaaaacttatgataacgtatcaccggaattccctcagacatcgctttttctatttcaggatgcgtgtctgggaatgcgtttccggcgatgactgtcatgccgggtttaatattttccgcgctaaaaggaagaatcgtaatatttcttttttcaagcgctgtttgcgtaaaaataaatttttcgatatccgatccttggacagtatatccattatcatgaagtatttgggcaagcggactcataccggtcccttttattccaacaaaatgataaacagtcataattgtacctccaacaaacgtctatctgttccccagtatatgacgctcatttcaatttgcgaccgcggcggctgaaaagcctcccttagcggcgtattttatatgttttgttatgtttagtatcaggttatttctttccgattaaacccagatatcaagatttgtctatgcacagctgctgtaaagcggcatagctgttaaatgctctaaacactatcataccatgtttggtgtgaaaatgaacccatattattcgtttattaaatcacttgctgtgatcagcacctctcgaggcttgcttccttttgcctcagagatcatgccttccgcttccatcatgtcgatcagccttgccgcacgattgtaaccgattctgaatcttctttgcaggcttgaagtgctcgcactgttttgctctacaacaaactcacacgcttcgtaaaacagttcgtcctcttctttcagggcagatccttgtcttacgagctcttcttgttcaaataaataggtcggcggcatttggcttctgacgtgggaaacgacgcggtcgatttcccggtctgacacaaagttaccttgcagacgaaccggttttcccgagccgttttccaaaaagagcatatccccttttccgagaagcttttctgcaccggctatatcaataattgttcgggaatcaacctggcttgagacagaaaaggcgattctcgttgggatattcgccttaatcagacctgtaatgacatcgactgacggacgctgagttgcgacgagaagatggataccgcacgctctggctttttgggcgatccgcgcaatgctttcttccacatcgtttggagccaccatcatcaaatctgcaagctcatcaataatgacaactaaatacggcagcttttcacccatttggtgttcagcggttaattgattaaagcggtcaatgtcgcggacacctgaatgggcaaaaagctcatagcggcgctccatttcctcaacgacccatttcaaagcagccgtagccgctttagcatcagtaatgaccgggctgacgaggtgaggaattttattgtaaggggccagctctaccattttcggatcaatcagcagcacctttacctcactcgggtcagctttataaagcaggcttactaatattgtattgatgcatacgctttttccggagcctgtagcgccggcaatcaagccatgcggcattttcttcaagtcgataacaacaggatttcccgaaatatctaatcccagcgcagctgtgagcggtgacttgcttgtcctgaaagctgagctgcgaatcatttggcgcaaatcaaccaccttgctcgtgcggttcggcacttcaattccgatcgtgtttttccccggaatcggcgcttcaatccgaatatctttagctgagagactgagtttaatatcatcggacaagttggtgattttattcacctttacacccggttcaggatgcacttcaaatctcgtgacagacggaccctgggttacatggaccacattggcgcggacattgaaatttttcaaggtcaaatcaagaagctgacgctgttcttcgatccacgcagtatcatcttgaacctgcgctggcgggacatcaagcagtgcaacattcggaaatacatagctgccgcggcgctcctctgctttttgctgtttatgcgtatctcttttcagcatcatcacattaaaaggaacggatggccctttttgagaagatgcgctttgttcagtccttttctcctgtacaccaggcctttttttcggctcttctgaagcttcgcgaggtttgtctgcgcgaatttcctgccggttttcaagagttgcagtagacgatttggaaccctgctccatgtgttcagttttctcaagctctgtatggctgtctggctgaacatctatcttcgtttcctgagcctctcccagggtgtcataatgattatttattatgctttctgatggctcttctgattcttttgccacagtttctgcttgagccagagcctctgatgaatactcatgatcagtaaataaaggctcttcctgacgaatgtccatttgttcttcttgaacgaacggggactcagcaccttctgccgcgttttcatgatgattgtatactgggctgtctgacggctcttttgctttttcatcctcagatactgcctctgtctgagattcaggagctgtttgctcttcatcaagttcagcggagaaaacaggctcttcaaatttctctggctgctgctccctttgttcttcctcagccgttgcaggctcttcgcggcctacttcactgtctgaaagcccttcagccgccgtatctgtgagcatctcaggcggtgtttgctcttcggcttgttcagctgggaagaaaggctcctctttttccggctgttgaacgcctgactcaaatggcactttgttacctgacggctcggctggccgtttcgccagcgcctcatcatgctccgtatcctttctgtttaaaacgccagaaggctgtttttcaaattgggtatccgggaagaaaggactttctattttggaatgcgcctgtgtgtctgaagcaggatagccgcgttcacgttcgatctcttctgacagcagtgttaccttctcttttaccgatttatccggttcgttcaatgtttcagaaggctttttcggcacatcctttttaacagatggtttttgattgaatccatagacaggcgaagggatatttgtcggtttaaacggtttcttcgccggctctgctgcttgatatgtatgctgctcttcttcatttctgggacgctctctgtaaggtgcagcacttggacgaggcgcggatttcggttcgtccgatggtgtgcggcgccttctcaggtcatgatttttgtatccgtcaggcacgactggaaaacggaatttgccttttggatattcataatatattttaggatcttccaatctttttaattgtccttcaggatgatgtacttcttgttgctgcggaatttgagcgggttttgtctcccgttcagcatcctcttcgctttcgcctaaaaacaaatcaaaaaatttatgaagccaactcataatttatctctaactcccttatagttttctgggacggtttttagtataccactgctggtcggcccagaaaagattaagctatcagcagaaacaaagccgctaaacaagggcttagcggcttttcacatgattcgttttttttggcggatttatgggagtctaaaactgaaatgcgtctcccgcctcatagtctccttctaacacaaggattcctttttcagcaggggcatccggcaaatcaagctctttcgctgagcagatcatcccgcttgacggaacgccacgaagctctgcatccttaatgacaagtccgctaggcatcacagcaccgactttggcaacgacaactttttggccttggtcaacgttaggcgcgccgcagacgatctgaagcgtttcttctcctacgttgactttacatacgcttaatttatccgcattcggatgtttttcttttgattctacataacccacaacaaacttcggagataaatcaacgactaatgtttcttcaacgccgtttctgtttaaaatctcattcacatcttgcacgaatgtttctgagagcgcaacagggccgttttcatcaatggtcaagtaagaagacgcattgaaaatgttgaagcccgttgtttcttttgtttcgttattgaaaattttgacgacgtcgccgtgtttttcatagcctaattgttcgcgtgtcacatcttgaagagagatcaggagcgtgtctcccacaccttctttattataaaaagcgttcataagtaaaaatcctttctaatcctttttcggacggcttttcgccaggataaacaccggttccagctttccttcattgtacaaaaatgatagggcggtaatcgggacggtgccgcctgcaaagaagctcatcgacatttgtcctagaatatcataccccgattcattccggatgtcagcaagaatcaaaacgtcctgatgaggaacagagatcgccagctcaccttctgcatgctgcttatactcatttaagatcgcttcgttcaaaatccggcttgcgtcgtatccgtcgtttgccctgaagaaataaaagtaattgccggcaaccgtatcctctttgacaaccgtcggcagggaacggagattaaatgcggccgtctctctgatccgctcttttgtccagttttctttctcaagcatgcgctggtcaattaaacggtaggttttcccgagatctagcgcgtaataaattcttgtctctgcggtatgatcgtcataaatgagcgggatatcttcgctggacttgtccgggaaggaagtcgagcggatgaccggataaatgcgagtttctttcccggtcatttcctgagccttcccttccattgccgtcatcgcttcggagacatagtacacgatctcatcaatggcttcgtcttttttcagttcccattttgcaataatcggcggcaaatcgagtgtaatcccttttttagtcgtttgatcctcaacacggagggtgtctttttctctgtcaaacagaaaggagcgattctcgtgctgaaggcgctgcttcagtatatctgacagcttccttgaggtcattttcaaaccgatgtcctcctttacgctttagcgagagagtctgttaaaaactgttcaatttcttcttttgttttgcggtctttgctcacaaaacgatttacttcttttccttcattaaacaccacaaagcttgggattccgtaaatttcccactctgcacatgtatcaatgaatttgtcacggtctacgtagtagtaggtgaattcagggaaattcgcttccagttcaggcaggaaaggctctacaaaacggcaatccgggcaccaatcggccgaaaacataaatacagaccaatcatcctttaccgctttttccagctcttgagttgattcaatttttttcatttcatatccctccagttgtttatgttcttacatgttttttatcgatactcgtccatttggatcataccaaactgcttgaggcaaaaccacttatatgcaacgaatgaatatgtaagattggctttcccattatcattatcatattttatttgcattatcaagctcgtttcgtttaacatcgtgtacatgagggtgaaatttacagatggatatacataaggagggatttttattatggagtttatcgtctatttagcaggagaaatccacagcaattggcgcgaggaaattaaagaaaaaacaaaatcactgaagctcccgattacgtttgttggcccgatggagaatcatgaccgctcagacaatattggtgaagaaattatgggcgtacagccaaatgccgttttaaaggatgacaaagcctctgacatcaacaacttcagaaccgccgtcctgatgaataaagcagactttgtgatcgccctgtttggcgaaaagtacaaacagtggaacacggcaatggatgcatcatatgcgatcgcaaaaggaaaacccctgattatcatccggccggaatcgctccaccatcctttaaaagagctttccaataaagcgaatattacggttgaaaccgttaaccaagccattaaggccctttcctatctatttgaaacagaataagaaaaaagcttgtcgatccgggcttactgctcgttcaacaagcttttatgaaacctacatattttctttaatcgcatccactgtctgcttatcgcaggctgttacaagtttgatgagcatttctttagcagcagcataatcatcaatatgaatgatagtagcgtttgtatgaatatagcgggaacatattccgataaccgctgacggcacaccgctgttcgaaatatgaaccttgcctgcgtctgttcccccgccggatacaaaatattgatatggaatatcatgcgtttcagccatatcaagaacgaattccctcattccgcgatgcatgactgtcgttctgtcaagaatgcgcagcaaaaagccttttccaagctggccgaattcatttttgtctccgctcatatcgtttgccgggctggcgtcaagggcgaaaaacaagtccggtttaatcatatgagaagccgtctgcgcgccccttagccctacttcttcctgaaccgttgcacccgcatagagtgtattcggaagctctttaccgtgtaattccttcagaagttcaatgcttaagccgcatccatatctgttatcccatgcttttgataaaattttcttttcattcgccatcgtcgtaaacggacaaacaggcacgatctgctgtcccggtctaatgccgattttgatggcgtcttccttatcatccgctccaatgtcgatcatcatgtttttgatatccatcggtcggtttcgctgcgcatctgtcaataaatgcggcggtatgcttgaaatcacacccggaaccggcccgttatctgtttgaatttcaacccgctgcgcaagcaaaacttggctccaccagcctccgagcgtctggaatctgagcagcccgttgtctgtaatggatgtcaccatgaagccgacttcgtccatgtgcccggctaccataattctcggtgcgtcctctgcgcctcgtctgactccgaaaacacttcccagtctgtcctgaacgatgtcatctgcatatttggctagctcctgcttcataaaagcacgaacctgatgctcattgcccggcgcgccgggaagctgcgtcagtgtttggaaaagcgctttcgtttcttgattcatgttttcccctcatttctatgtagtccttttattttattagaaacaatgaagttttccaagcactctgacccaatctgctcgatcagccgcgtattgcttaacaggatttggctgtttctgtataatgaaaagtacgatcaaccaggaggtgctttattttgaaattgcgtcatcttcttttaggagcaggacttggaatttgtacggctgtcgttgtgagacaatatgtgatgaagccttatatttcttcagaaaaagcgcttcgaattgtaaaatctgcttttaagcagcggggcccgattgacggatcatggatttacacccagccggagccctacaatattaacggagaaacggtacaggtatacaaaaccggcattacacgatcagctttcggagaattagaacagtatgaagtcatggtggatgcgaaaacgggagaaattgttgatgtcattgatacaatcgcctcttaacaccggacaagcaaaaaatagaagccgctgcctatgcagcggctcttttttattatatcgcgcgaatcggtttgtataccggataccacatcgcatcctgcactgcctgtataatgtcttcaggctcttccgtagcgacgccttccttcattgcggtttttgcaacttcaacagcaacggttgccgaaacagtgcgcaaatcttcaacttttggaagcatcggcgccccaggcaccccgacattgaccatacctgcgattgcccgggcacatgcttcaaacatgccgtcggtaattaattttgattttgtaacaatcgttccaagaccgagaccagggaagacaagcgcgttgtttgcctgcccgatatgatacgtaactccgttatattcaactggcgggaacgggcttcctgtcgtgatcagcgcacggccttctgtccattcgattaaatcctccggctttgcttcagaaagagttgtcggatttgacattggcaaaatcgccggccgtttcacatgtgacgccatttcttttacaatttcttcagtgaaagcgccggaaaccgtagatgtgccgatcaggatcgtcggtttcgcctgccgaaccacttcaagaagatcaatgcctccgccgtctccgttccgctgataatccttcacttcatcagccgaacgggcatacggcttttggaaatcaagaagctgatccatatcatctgttaacagcccgttcctgtctatgcaccagaagcgcttgtatgattcttcttcactcagtccctcgcgcaccaatgcttcccgcagctgttcggcaattccgattcctgccgttcccgctccgaatataacaactctgtgatctctcagcggaactttagacgcttttgcacaggataagactgcggccaaagaaacagcgccagttccttggatatcatcattgaaggtacacactttatctttatagcgtttcaaaatgcttcgcgcgtttttcgccccgaaatcctcccaatgcagcaatgcattcggaaatgtttctctcgccagcgcaacgtagtcgtcaataaattggtcataacgttccccgcgcactctggaatgctggttgccgacataaagcgggtcgttcaagaggctctcctgatttgtccccgcatctaaaacaacagccagcactctgctcggatcaatgcccgcagccgctgtataaaccgccagcttgccaatagaaattgcgattcctccgacgccccagtcaccgattcctaaaattccttccgcatcagttgcaacaattaaatcgatcgtatcgctttgatctttatactgtttaaaagcttctttcataccgtccgggtcatcgattgacagatagagccctcgtggttttctgtattcatggctgtatctctgaattgccgttccgactgtcggtgtgtagacaatcgggagcatttcccctaaatggtcatttaacaggcggtaaaacagcgtttcattccgatcgtgcagcgccgttaaatagacatttttgctcaaatcgtcaggctgtgcggaatattgttcatacgctcttttcgcctgatcatcaattgttaataccttgggcggcagaaagccttttaaaccaagttcttttctttcttcctcagtaaaagcaacacctttgttcaaaaaaggaacagagagcacttcaaggcctcttaatgttgtttgaatgtctccttcgtttgttactctgaattgtttcaccctgcctcttcctttctgagcataatagtactaggtttgcattattagccggaaaacatgcagggtaaacataaaaatatgctatcgcttcattcgcttaactgactttttgatgcttccgtcctcctcccattgaagggcgcgatactcggcatcatggtaaaaaataaaccaagcatctttttctgctgcgaacgcctgccatttctgcttttgcgggatagaggtcatcggataatcatcgtaagccagcacccatagcggattgcggtgggcatgtgtcggcatcagatctgccatatgtacggcagtttcacccgcatcctcgcatatcaggacactgtgtccgtcgctatggcctccggtgtgatgcattgtaataccctctgtgatcgttaaggtgtcttcaaaggttttgacttggccagctacagcctcccaattttctttccaatacgtatttttcgacctgatattcggatggcgcatttcgtcccattcaacagctgatgtataaatcactgcattcggaaagacagagacgagccgttcaccttcatattccgttaaaccgcatgcatgatcaaaatgaaggtgtgtcattgcgatcacatctatatcggcaaccgttaatccgagtgcagctaatgagggtttcacattcgactcttgtgtcacgccatagtttcgtttttgtttatcagtcagcttgccgtacccaattccggcgtcaatgatgatattgagcccatccttttgaatcaaaatagggtctgttcttagttcaatctggtttttttcattgactggatattttttagaccaaagcggctttggcacaacgccgaacatggcgcctccgtccatatgcgtcacgcctccgtcaagccaggtcaacgtgatgtttccaattttcattgtttccattttcaccccccctatcatcatggtagcaaacggcccataaaaaaaacagactcctgtcagagtctgtctttacgttctccattcaacctcagcccgatagatcggctggccgagtgcagagaatttttcttcatattctgtcataatattgccttccagattgctgttatgcaaatcgagactgacgtatgtcagcaggaggccgtactcagagaagctcttcaaagagtactcaaataaacctcggttgtccgttttaaaatgaatcgatccgcctttgcccattacttcttcatattttttgaggaagtgggaatatgtcaggcggcgtttttcatgccgtttcttcggccaaggatcagaaaagttcaagtagacccgtttcacttcccccggctcaaacacatccgtcagcgtgtccgcatctatattcagaagctttacattctgcgcttcgctgtcttttactttttggacggctgtcacgatgacgcttttaaataactcaataccaatataattgatgtcgggattttgtttggccataccagaaataaattggccttttcctgtaccaacctcgatatggatcggattgtcgttgccaaacactgtgttccatttccctttataatcagcaggattgctgatggcaatatctgcgttttcagccaaaaagtcatcagcccaaggcttgtggcgcattctcatatgattgacacctctatctattatttcgactaacaacataccatgaattaaaaagacccgcaagctcgtttttccagtgtatctctcttaaggccgagcgcataaaaaaagagggtcccgtctgctggaacactcctttcccatgtataaaaacgctctgttttgaacaatttaacccgtatgatactgaagggatgtgtaccgttatgggtttacattatgagcatcaagttcatttattgaaggatatattgactgaccatcaattggactgctgcggaacagtcgcagagtacgagcagcttgagcgtgtgattaaatcactgatggcaaacaccgagcttgattcaaatttcaaaaacgtgcttgaagatgtttaccgctacagccaatcaggaatatcgtccaaatccatcgactcacacatacaagagcatcagaacagcctgtctcaatgggtagagcaaatggattcgtattcctgattaatcaacaattcgtttcatgaggatatgcagctcttccattgcatcatgaaattccttatcattgccttttgctttatgccaggcaatgaaagtaattgtttcagataacacataccaagccattcgcaaccgaaggctttctgtcagctctatgccgtacatgctcagccagctctcccaagctggcttttcgacgtagtggtacagcaaaggcccgaggtccatcgccggatcagcgatcatggcgccgtcccagtcaattaaatacagctggttgtcttcagacaatagccagttattatgattgacatcacaatggcaaacgactttctcaccgaaatgcacttcatgcaggtgttcttccaaatacttgatcccttcttgaatcagcggcgaagattgctgcacagcaaatacagcctgcttcagctgagacaaaagagcccccgggttcagcggttcttttccaagtctcttcagcatgtccagcaaggcttttgatgtgtgtattttacgaagcaattcagcaacgggccgtccgctcatgtctttaggcttcagctctctgccggtcatccagtgctgggccgtaatgacgtccccattttccatccgttttgtccaaaccagcttcggaacaatgccttcggcggataaaacagctaaaaaaggtgagctattacgttttaaaaaaagctgctgcccgttatgtttcgcataatatgcatctcctgtagctcctccggcggggaagatctcccaatcgctacctagtaattgtcccaaccagttcatatcaatgttcaacccatcatttcttaaaatattttagaattaaggctaatcgtttctagtctatccagcgaatgcctttttcgtacgaatcgtataaaaataaaaaagacagctattgagagtctcatatgctaatcaatagccgtcctttaaattttagcgctatagcacaaacttcgtcaagcaaaactcttaagatctgatgctaaatataagataaccgttccgatgccgtttactgcaaccgttttcttgatttctgttgggtcttcctgaaatcctgatggatcacataaaagccgataaggtatgtcgtttggcagcctccactcgacggagtctggactcgcgtgatggataacaatgatatctttccattcgtcaacctcgtcaagatcataaagcctgtatgcgataaggtgttcttttagcgtcaagcattcaagatggcgctggatgtctgcagcggacctaagacggaatgcaggatgcgcttttctcagcgagatcagcctgcggatatagtgaacatcttctttgaatgtttcacggcgatcccagtcgagctggttgatgctgtcactggattgatagctgttttccactccctgcttcgtccggaaaaattcctggccgctgtgaataaacggcaccccttgggcaagcaaaataatcgcggctgcaagcctttgcctgcttcgctttcggctgtcattttcttgaggaagcgcaaagctcattttatcccaaaaggtgtgattgtcgtgtgattcgacataattgatggactggcttggttccggaacaatcggtgctaatgccttccatccggaagacccggcaattccatgcatcacagcttgtgctgattcaccgttgccgagcgcaaaccctgttgccttaaggtgaaaggtgttcccttttacagcgtcacgaaacatatcattaaaaaagccgatgcccggcattcttggcgcgttcgccaaagcagctttctgttcatgcggcagcggtgtagccaggtcccacccttctccaaaaagcaggattccgggctttgccttagttgctttctctttcatataaagcacggtgtcaatatctaaaatcccgaggagatcaaagcggaagccgtcaacattgtattcttcaagccaatagaccacgcaatccgcaatgaattttcttgccatccttctttctgatgcaatatcattgccaacgccggtgccgtttgatggcatcccacattcgtcgtgccggaaaaaataaccgggcactgtcttttcaaagggggaattctccctcttatacacatggttaaaaacaacatccagaatgactcgcagaccgtgctgatgcagggtattgatcatttgtttcagctctgtttttctcgtttgaggatcatgaggatttgaggcatagcttccctccggggcaaagaaatgaagcgggttatatccccaattgtatgcatcaagcggcttctcttcatcaactccggcaaaatcattcaccggcagaagctccacatgtgtcacaccaagctcttttacatacgctaatcccgaagaactgccatttgcggtttgtgtatcagtttccgtcagcgctaagtattttcccttgtttatcatgccgctgttttcatggatggagaagtcgcgaagatgcgtctcatagatgacggcatccacagggtgtgagaatggtttaagaggagcagtccatttcatttgatccgggcgcaagacgacgcccttctctccatttacagtcacagccttggcatactggtcaactgtttccatccattctgaattgttgcagatgcaaaacaaatactcatatccgtgaaggtcacctgtgaccgtaacggcatagacgcctttttccaagcgagtcatttggaatgtgcgcccgcttttattggggtgtgaaagcttgacagcagctgaggttgcagcaggcgcccatactttaaatacggtatgatccgcggtataaacggcgcccagctctccgtcataataaaattcgtcatcaaacgctgccgtccggatgaccgcgccaatttggagatccgttttgtggccgctggatgctctgacgcaatggatttttccaaatgtcacaggatggtcggatacgcagacgtacttgtattttgcttcaagggagtattcctccctgacagccagaggaaaatctgttatttctgtctcaagccgaaacggcggtgtcatgatttccttttgttcagcaggaatcagaacagtaatgatattcatgtcatcgacatacgcttcgaagctgcggcggatgctgaccatcggaagctctctcctccaaacacgtttatgttttgattcttaggggtgaaggactagatgccagacgaaacggggtagtgcccatgatttctccgtcagcatggaacgggattttgtccttcgtgtaaaatgtaatgtccttcgctttaaacatcgtaacgccatccatctttgtatgttttccaaatgccatgagacataaaagccaatattttttcaaaaacggctggttttcaacgattacgatatcaaatgtcttctcgcgcggatttgctaggggcgccgccttcatgcctcccccgtaaaacggatggttggatacaacggcaaaccagacatcatgaaattcgcgcgtctcgtcttccgtcgtacaagctaatgtaaacggcttaaaggttgccgaagcgtgcaaatgagaaagcggatacacaagaaatcgaaggcggagaaaaagaaaaacccgtctcaacggaaattccatcgcctttttattgacatatgcgtcaaacccgatcccgatatgattcataaaataaagaatctgtgatttatcctgaaggaaattgacgctccctaaatgaaaggttcttgttaacgggcgctttaccttcttgatttcctgtatcagatcgatttttttaatagagaaccctcgcgaaaaatcattatacgcgcccgccggcacaaagctcagctcaatatcgtcaacatctttcagcccgttgacaacttcatgcatggttccgtctccgccaatgacgatcaggcgcttcagcttatattcctgtatcgttgaaatctgtctggcgagcacctcggcgtgtcccggatgttcagttaaaaatgaacggtgctcaacctttcgtttgatcaattctttttgaatggacttccaaacacgcaggccgtttcgatgtcctgctgtcggattaataataaaaaaccaatggctcatctttctcacctgcttatgttatgagaaaaccgctcaaatcgttctcttttactccagccactcctgtctgcgataggagtcagacatgcagtaagacaatagagcctttgcagcctttacctgatgatgtttgatcggagcagtgtttttcttctgccgctcaatccattcttccgcgctccgcttatccgctatttctaagccgtatggcggctccgggtaatcgatgtacgacgttctgctcagaagcaattttcgaaccggaatctcagcctgtttttcctttacgatctttgacacaaccgagtccgtacgaaacaggctaagccctggatttaacactgatgcagtctgagaggctgttttcttgtcccaaaaacgatttttagaccctatgtagacactgtcttcctcagcctctaaaaaagaaacgcaataaatttccagaggagaaataatcacaatgcttaattcaaccgccgcctgctgaattttcagcacaggcttatacataataaaataagaatcaggcagctgctgggtcagataacgcaaaatgcggtcctgcttcacttggtttgagagttgagatatttctgaaagagtagagcttgcccatttgagctgaaaatcatataaatgccttttataaaaagaagcaagcgccaccctgctcttcgggagccttacatgaatatcttcttcgtcctcaaaccattggtgtctctcttcttgtatatcggcttttatctcttcttttcttcttttcaatgaaaatttttttcgtttctgcaccggttccggttcttcagcactggcttgcctttcttcatgctggcgctccgctgcttctactagtgaaagccagcgctcttttttcaaacgtacaaactggttgatataatggtacggatcaagctcatatctcgatatataatcatgaattttgatgatttgtgccatgtttgtttctccactccgcaatgaattaagataattgaaatttgaatatttcctcgtattttggtgattggttcaagtgtatttgaaagagcgaaaatcgttcagccatcatcgaaacctcgccgctttcaaacggaacatgagctggaaatccatcttcgcctgtccattttcttgccagcgtcatatgaggatgatacggtcttttttccacttgaaagccggcctgaagtacagcctgcttcgtatgttcccgcagtctatcaagcgttttgtttttctttggctccagatgtaaaacgcgcggctttctgcggtcgccgaatacatctatcttgccaaacttaattgaaaatggatcaatttctgaagcaatctctgctagcgaaccttcaagcttctttatttgtgtctcatccgccgctccgagaaaaattaacgtgatatgatagtcaagcgggtgcacccatttttgaaacgtcaatatcggttcgtttttcgcagcctggtagatcggatttgcaattccctcaggtatgggaacgccgatgaaataatgaggccgtatatctggcatccgtctgacactcccttctttgacagctattattttatcaataaagaggctgtgcggatagaggaacagtgtatgaaaacactctcgcacaaacgtttattatgttaggatattatatgacacttgttttattcagaaaggaatgacaatgttgaaaatcgttgcaaacacagctgatctgataggagatacaccgctagtgagattgaatcggcttcagccggaaaatgcggcacaagtctatttaaagcttgaatttttcaatccgagcggcagtgtgaaagacagagccgcttatcaaatgatcatagaagctgaacaaaacggtttactcaagccgggatcagttattatagagccgacaagcggaaataccggcatcgggctcgccatgaatgcggcagcacgcggatataaagcaatcttagttatgcctgatacgatgacgaaggaacggatcaacctacttaaagcttacggtgcagaggttgtattaactcccggagaggaaagaatgccgggcagcatcaaaaaagcgaaggagcttgccgaacaaattccgaacagctatattccaatgcagttcgataacactgctaatcctgatgcgcaccgaaaaacaacagcgcctgaaatcgcccgggcaatagaggaaatcggaaaaccgctcggcgcttttgtagcctcctctggaacgggcggaaccattaccggaacaggtgaggcgctcaaagagctttttccggatatcacggttcatgttgttgagccagcgggttcgcctgtattatccggcggaaaacctggcgcgcataaacttgtaggaacgagcccaggctttataccgccgattttaaatgaagacgtttatgatgaaattatcaaaatctctgatgaagacgcgtatacgacgacaagacggcttgctgctgaagaaggaattcttgtcggtccttcatcaggcgctgcctgcttcgcggcaatcgaaacagcgaaacgcctctctcctgacaaagttgtggtctgcatgacagctgatacaggagaacggtacttatcaactgatttatggtcatttatttaaaaaaaggactggcttcagcagaagccggtccttttattttgcaagctcgtaaatggcctgagcatataacgctgtcgatctcagcaggtcatcaatttcgatatattcatccttttggtgtgcgctgtcagggcgtccggggaacagcgggccgaacgcgacaccggcttttaaggatctcgcataagtccccccgccgattgagattaaatcagcttttttacccagctggccttcataaaccttttgcagggttttgactaacggatgatctgcggacacgtgatgcggcttgctgtctttgaattctcccagctcaaattcagatgcgctttcgaatgtatcgcggatcactttgctttctgctgtcacaggatagcggatattgatcccgagctcgcctccttgcccttctttatagcgcagtgttccgacatttaatgtcagctctccgctgatttcatcctcacagtcgatgtccagtttttttcctcttgtatcacctgagaacttatctgtcacaacttgcacaaaccgctttcctgcatcgtcaagctcagtctgctggagaaattcgcacaataaaatgccggcattgatcccattgttcggttccatcgcatggcaggaaagaccgtacatacgcaaaatgagctgtccgttctctattgcagcttcccctttttggtccgtcgtgcggagcatgtctttaaatgaagacagaatctcttcatttttcggcccttcaatgacagcttccgcagcgtcgggcaccatgtttaagcgaaggcctgattgaaacgagacaagcactgcctttggttcagcttgatttgggcggtgcggaataagtaaagaagcatcgatgatccctttttccgcattaatgatcggaaaatcggcgtcaggcgcaaagcccattgttggcatttcttcatgcttgaaataatgctctacgcatctccaatcactttcttcatctgttccgataatcattctgactcgcttggacaggggcaaattcatgtctttcacgattttcagcgcgtagaatgccgccattgtcgggcctttgtcatcaatggcgccccttgcataaatccgtccgttgcggatttcagctgaaaatggatcactcgtccacccatctcccggcggcacgacgtcaacatggcaaagtacgccgataatgtcatcgccctccccccattcaatatgacctgcgaagccgtcaagattttttgttgtaaagccttctttttctccaagctccagcaatgaagtcaggctggcatttaccccttctccaaacggtttaccgggtccggcggttgtttcgtccatgacactgttgattctcaaaaattcctgtgtatcacgaattaaatcctctttttttctgatcacttcaacttcccagttcataatgatcccctttccgcaagaaatgacttgcaaaaaccaaataaaacgaataatattaatggtgttttgttaaaacgttcgtaattggaggatactatgtttcatctaaaagagcagcaaacatccataaagcaagaaatcatagcagggctgacgacctttttcacaatggtctatatcgtcgtggtcaatccggtcattctggctaacgccggggttcctttcgaccaggttttcaccgcaacgattattgcctccattgtcggaacgctgtggatggccctggcagcaaattatccgattgctattgcgcccggcatgggcttgaacgcttatttagcctttcatgtcgtaagcgcaagcgatggcggcatcacgtacgcaacagctttcagcgcagtatttacagcaggggttctcttcattattctatcgttaacgcctttaagaaaacaacttatagaagcgattccaaacaatttaaaatacgggatcacaacagggatcgggctgtttattgcttttatcggtttgcgtcaagcgggaattgtggcagctgatgagtcaaacctggtcactctcggcaatctgcattcacctggtgttatcttaacgctggtcggccttttgatcagcgtggtcctgatggtgctgaatgtaagcggcgctttatttatcggaatggcagctaccgctttgatcgcctttttcaccggtcagctccatttttcaaagggatttatgtcgcttcctcatttgccggaaggattgatgatctcaaatccatttaccgcttttggcgatgtcattcatcacggcctgtacgctgtcgtcttttcttttctattagtcaccatttttgatacgacaggcacgatgatcggagttgccgagcaagccgggctgatgaaaaacaacaagctgccgaacgtgcgaaaagcgctgcttgctgattcaaccgcgacgacagtaggagctgttttcggcacaagtccgacgactgcatttatcgagtcttccgccggtgtcgcagccgggggaagaacggggcttacggctttgactgtcgcggtgatgtttgcggcttcaatgtttttcagtccgcttgtcagcgccttgtcaggtatagccgccatcacctcgcctgctttgattatcgtcggcagcctgatgatgggctcagtttccaatatgaactggaaagagatggacgaggcatttcctgcgtttctcgtcattctagccatgcctttgacctcgagcatttctacaggaatcgcgcttggctttatttcgtacccaattgtaaaagcggcgcggggaaaatggagagagattcatccgctcgtcatcgttttcgccattctgtttttcatccagctgtttattttataaggatagaccaaaaaacccaaacgtcgccgtttgggttttttatgtaaacaataaagagacagcggccgctaaaaaacaacaggcggcaaacgcatagtgcaggatgttgatacagctttttctggcccgataatattcatcactttccttatcggtgccaattaaaaaaggggcatccatgaccttgtcaaaaataagcgtcaggatataacggcaaacccctgtgtataccagcagcgcaatcaccttcagccaaattggggaaacaaatatgagaacagtgaaagctgacagtagcatgtacatctgccttgcatactcgccattcctcagcataactttaaaaaacaactccttatagcctgtgcagatcgttcgtcttttaaatatcctttttgaatttcggtataataatggttttcttctcatcctgtcttttacttttggcattcccgcctcctgactcatcatcatcacaagtcctgcaagggcaagcctgctttttttctcttcagtcacctcagcttcaaaagccgtgaacgaggctgtctttttcaaactgcggataactgagaaaaacaaaaataaaatgccaaaaagcgcaagcaagtgccgctcagtaaaaacaatcaggatagcagaaccagcaaaaagaatagctctgacaagggtatcgccaatccatctcgaaatggagcgcggctttctgatcctgtcttgctttaaggataaaaagaatatatgaaggccaaacaaataacacaatagagcagtgctttctgcgaatgtgatgagaacagaatgactgatcaagggaaggacaatgaaaaagagaagcagccatttagccagcgtggccagaaaagaatacaaaagcgcataccgtttgagctgatagatgatttccttcttttgcagcaaaaacactttgtccgcttccattaaaaatgtacgaatcgaacctgtaaacatgatcagcacacacacagcatacagccatctccattccgccacttcagaccactcataaagaaggcctcttccgttcatcaaatcaatatactgatagatgacaaaagcaatcgccggcaaaacgatatagagagcgactgtccagtcaatgaccgcatgcaacactttaaactgatacttataatagtcaaacagccttcgaaaaaagagcgtacgcccgttcatagccgatcaccttgaactgccttataaaaacagtcaagcaatgactgcccctctaatccggtcttgtcctgaacatcttttaacgtgccttggagaaataatgaacctttctcaatcatataaaaccggtcacagattttttccgcggtatcgagtacatgcgtgcacataagaattccggctccacgttctttttcagccttaagcatgtccacaaagcgtttcgtcgatatcggatcaaggccgataaacggttcatcaatcacatacatatccggcttagagagaaaggcctggataagcattagtttttgctgcatgcccttcgaaaaggtgacaggcagctcatgtttgacatgatctagcgaaaacgtctgcagcaggctttgggcccgatgcgcaaattcactctcttcaatgccgtgaagtgtgctgatcagatccaaatgctcccacagcgtcagttcttcgtagaaggacggatgctccggaatatatgcaaatgaacagtcgttccaggcaatatgccctttaaaatcttctgaaaggccgagtatcgccttgattgcggtgctttttcctgcgccgttagctccgatcagtccaaccagttccccttttctgacttccagaaaaacatcggtgagcactttttttcggcttgtatacccggcctgttctattgaagcttcaagcaaatttgtcaaaactcactcacctccaaaatttactacgaaatagaataaaaaaagtttctttaaccataataatattgagccgaaatacatagtaatccaacaaggatggctgcccaacgcgaaattggaaaaaattaataggagttatccctagattcatcactgcaatatcgtgtataatgagggcgaattattttaacaattacagatgtctgcctttgttgctatttcgtacgcagttgatagtcgtgagttgtggttagtcaagtccatccgatcttatgatagggagtggttttttgaaaccttcaacaaaccgtatgctaactcgaatcaaatcagtttacatgtttattcaagaaaaaggtcttgtgacaacacaggaactggttgacgaattcggcattacacctagaacgattcaaagagacttaaatgtgttggcatataatgatcttgttcatagtccaagccgtggcaagtgggagacaacgagaaagaaagtaaagattacctcataaattgaaaattacatagggccgcctgagagcggtccgatagataacagggcgaagaaactactgagccttgtttttgtgtgcttataaataaaaccccgcattcggtatgcggggtttttgtcatgcttgcggctcatttagcaaatgaagctcttcctctgtcagctcacggtattctccgggtgccagagcgggatctagggaaacgcgtcccatcgaaagccgcttcagataaaccacttcattgccgactgcctttgccatttgcttgacctgatggtattttccttctgtaattgtcagatatataacggtattgccactgtcgtttgttttgatttccgcttttgccggctttgttttatagccgccctctatgtagacacccgtttccaaatcggaaatgtcttcccgagaaatctgtgattttaaatggacttcatacgtttttggaacatgctttttaggagaaaggagccgatgtgcgagctggccgtcatttgtgagcagcaaaaagccctctgtatctttatcaagcctgccggctggaaatggctcaaatctcatctcctccggcgtcagcagatcgaccactgtttgctgccggctgtcctcagtcgccgacagcacgccctgcggtttattcatcataagataaatgaactctcgataatcaaccggttccccgtatacggtcacctcctgcgtatcaggatcaacgtgctcctttacatctttggcaggtttgccgtcgatcatcacggctccagccttcacaacggctttgacttcttttctggaaccatacccgctgttggcaagcagcttatcaagtctcattcccaatctctcctttataaaagaaagcccgcagcatgcgagccctcagtttcatcatatctagttcatcagcctgcatgtctgcctttcctaaagaaacctggcaaacggcggcctaaaattttctgcaaaaatcctaatcggtagccgcaatacaggtagacagctccgccaacagcggccgcgatcaccacaacaatcgcagcttgcatctggccatcctgataggaaataaagaagcctaatacccactgcacgattttcacggcaatacccataatggctgataagaccagcatcaaaacagttcgtttaacaagtatcttatacgaatagcctgcatggcgcttaatcatgataaacccatataaaagggaagcgatatatccaagcgccgtcgctaaaatcgctccgtcagcctgcatcagcttgatcagcggaacattcagcacaagcttgatcacgacaccgatcacaaggctgacaaccgcaaatttttgcttattgatgccctgcagaatagctgcgttgactgtaaacaaagagaacagaattgcgacaggcgaataccaaagcaaaatgtttgcccccagttcaggatgaaggctctctgacccgtaaaagaacgtatacgtcggtcctgacaatagagagatcccgacaacagccggaataattaaaaacaggatcgtctgcatcgtttgattaatctgctgatttaacagcttatagtttccgcttgtaaacgattcagtaatcgttggaattaatgtcagtccaaaagcagttgctagggaaaccgggatcatcacgagcttctgaacatacagggttagaatcgcaagcatgtcctggctgatggcttgatgaccggcttcaatcatcgctttgttaaacgtatttgtatcaatatagttatacaaagggatggctagtccgacaaaaacgtacggagcagcatagctgaacagctcgaaaaacattttcttgtagcttaggtttgctgtcggacccgtattcggcatcatcgccagcaggctgcccttccgtttgttccaataaatataaagcacgaccagccctccgaaggcaccgatcagcgctgcgaaggttgcatagcccacagcgatgacaaggccgccgttgaaaaccttcaaaatcaagaatgtcgcactcaatagaaagatgatgcggacaatctgttcaacgacttgggaaacagctgtcggacccatcatttggtgcccttgaaagaatccgcggacaaggctcataatcggtacgaccaaaagcgctaagctgaccatgcggatgacataaacgacatgatcaattgtcaggccgttattatccttgcctcccagcgatatttccgcaaacatcggagccgatagatacagaatgaaaaaggctatcattcctgtgactagcataaccgacatgcccgccttgagcattttcctgcttgtctcataatccccttttgaattatatttggaaacaaatttagaaacagcggccggaaagcccatcgtagcaatattcaaaaataaagtgtattggttgtatccgtattgaaataatgcaccgcctgtcgccccgaccataatgctgaagggaattaaatagaccatccccagaatccgcgatatatatgtaccgagcgttaatacaaacgtgcctcttaacagtttgcttgacatgtttcttcatcaccattttctacgaagattcaacttttctattttaccacaactgggcatttagacggtaataaatacaaaagcaatcctgtgaacattcatgtccgcggcaaaagacgtttaaggagcggctttctttcgctataatagtactgcggacgggtgtccgcacacgaaatgaaaagaaagttgatgataaagatgaaacaatatgacgtaatcgtaatcggcggaggcccttcaggcttgatggctgcgattgcagcaggagaacagggcgctggcgtgttgctgatagataaaggaaataaattaggacggaaactcgcgatttccgggggcggccgctgcaatgtgacgaaccgccttcctgtggaagaaattatcaagcacatccccggcaacgggcgttttttatacagcgcgttttctgaatttaataatgaggacattatcaagttttttgaaaacctcggcattcaattgaaggaagaggatcacggccggatgtttcctgtgaccgacaaagcccaaagtgtcgttgacgcgctgttaaacaggctaaagcagctccgcgtaacaatcagaacgaacgagaaaattaaatctgttttatatgaagatggacaggcagcagggattgtgacgaataatggcgaaatgatccatagccaggcagtcattattgctgtcggcggtaaaagcgtgcctcataccggaagcacgggagacggctatgaatgggctgaagccgcgggccataccataacagagctgtttccgacagaggttcccgtcacttctggcgaaccgttcattaagcaaaaaacacttcagggcttatcactaagagatgtagccgtcagtgtgttaaataaaaaaggcaaaccgattatcacacataaaatggacatgctgtttacccatttcggcctctcaggacctgccattctcagatgcagccaatttgtcgtaaaagagctgaaaaaacagcctcaagtgccgatcagaatcgacttgtatccggatatcaatgaagaaacgcttttccaaaagatgtataaagaactgaaggaagcaccgaaaaaaaccattaaaaacgtgctgaagccttggatgcaggagcgctatctcctattcctgctcgaaaaaaacggcatctctccgaacgtatcgttttctgagctgccgaaggatcctttcagacaatttgtaagggactgcaagcagtttactgtcctcgcaaatggcacactgtcgcttgataaggcatttgtcacgggaggcggggtatctgtaaaagaaattgacccgaaaaagatggcttctaaaaaaatggaggggctttatttttgcggtgaaattctggatatccacggctacacaggcggatacaatattacctccgcccttgtcacaggcaggcttgcagggctaaatgccgggcaatacgcccgttcttaatcattactctttaaatctcttgccgccaaactcacatttgaacattccccgcattcatgttagggtgagacttgttttgtttcacctgattgcggggtaattttaagagaggaatgagctgccatcgtacgaccatactaagcctgcgagcaagatataggcgtacacaaaaaattagagggtgagaaatgttgaaacatatatctagtgtattttggattgtgattgcaatcacagctgcagctgtattatggggtgttatttctcctgacagcctgcaaaatgtgtctcaatcggcacaagcatttattaccgattcatttggttggtattatcttttagttgtctctttgtttgtcgggttttgtctctttttgattttcagcccgatcggaaaaatcaaactcggaaagcctgatgaaaaaccggaattcgggttattatcatggtttgccatgctgttcagcgcaggcatgggaatcggcttagtattctacggtgcggctgaaccgatcagccattacgcaattagctctccatcaggtgaaacagaaaccccccaagccttcagagatgcactccgctatacgtttttccactggggtttgcacgcttgggccatttatgccattgtggcattatgcattgcctatttccaattccgcaaaggcgcacccgggttaatcagcagcacactgtcaccgattctcggggataaagtaaacggaccgatcggaaaggccattgactgtattgcagttttcgccactgttgtcggggtgtcaacaagtcttggtcttggcgcaacccaaattaacggcggtttgaattacctgttcggcattccgaatgcgtttatcgtccaattggttttaatcattattgtgacagtgctctttttactttctgcgtggagcggactcggaaaaggaattaagtatttaagcaacacaaacatggtattggccggattgttaatgttgtttatgctcgttgtcgggcctacagtgctgataatgaactcatttacagattctatcggacaatacattcaaaatatcgttcaaatgagcttcagactgacaccgaacgatcctgaaaaacgcgaatggattaacagctggacgattttctattgggcatggtggatttcctggtctccatttgtcggcattttcatcgcccgtgtatccagaggccggacgatccgcgaatttttaatcggcgtcttggtgacaccttgtattttgacatttctatggttctccattttcggcgtatcagccatggatctccagcaaaaaggcgcgttcaatgtagcaaagctgtccactgaaacgatgctgttcggaacacttgatcactatccgctgacaatggtgacatcgatccttgcattgattctgatcgcagtattctttatcacgtcagctgattcagctacattcgtgctgggcatgcagacgtcgtacggttctttaaatccggcgaattctgtgaaactcagctggggtatcattcagtccgccatggcggctgtgctcctatattccggagggcttgccgctttgcagaacacagcgattctggcagcgctgccgttttctatcgttatcctgctgatgattgcctctctctatcaatcgctctcaaaagaaagaagagagatcaaaaaagcggagaaactcgataaaccaagaagtccaagagtgaaaaaagcatattaacaaaaaagatctttccgcgcctgcggaaagatctttttatttgcgatataaaataagggcggaaaaacagtaaagctgctcgccgtctgggtcgcacgccgccgaaaccgtatatttgatatctatcagctgctcctccgatatcccttttaaaaatgaattgatttccgtttgtaagtctttttcatgctcttcatcaaataccgctaccttcagcattttatccgctctcctttctctatcaatctattccgtttggaacagcgttatgatagagaaatgatgattatctcgtttccggataaaaagctttccgtatatgggatttcctctgtggctcgccgccgtgctgctccactttcagcagcacggcataaacaatgcgcatatggcagtagctgataaggctgacgctgaaaaaagggacaatgcccggcaggtacgcaagcaagaaaaagagagcaacagtcagcgcaagcatagtaagcgtatattgcaaatacgccacactgagcaagagcgaaaatttcacatacagacgttttttccagtcaaaatggacaagcagcggaaacacataaaaaagcatggatacgaacaaaaagccaaatatcataatggcgaagcgcaggatgtgcagaaggaaatgacttggataaattaaggccaaatcaatataaatgatcactccgatgagcgccagtacagcgccgagcagatttgaacgaaaaaattcacccttgtattcctgccaaaacgttttgagcaccggaacgttgtcctgcccctggatccacttccgcatgacagcgaataaagccgcggtcgcgggcatgatgccaaacacgccgagaccgagcaacgtaaaaaacagccacagcaagtttgtatacgcaaatctcataatccattcgcaaaaacgcagcatccgtcccagtgagccatcatgttccatggcgccccctccttttttgcattatacattctgcatctgaaaaagctctttcatgccgatcggcttcttttcggcaaccgagcgccacattccctcaccaaccgcgatggagtaggctccagcttcagccccggctaaaatatcatagcggcgcagcgggtctttccctaaaaaaagatcctcaagcaaaagcggatcacctccgccatgccccccttcatttttgaccacttgtatcgtctgctttgattcaaaaagcggatagtattcgattgtctgctcaggaaaagcaaacggaattctggaaggttcgtgaaattcatttgattcaatacgtccttttgtgccgttgatcgtcagccggtagccttcatacggggccgaaaaaataatcgagtagcttaacagtgcgccgccatcatatttgactgccgccacgtacgtatcctcgatgtcaatttcctcgtcaaaaatacacgcgtcaggcctgtatgcagtatataagctggactggtctcctgcttcaagatgatcatcctttatagaagctttagaggaacggggatgccaccttgaatagtagtggcatttttctttaacacggcacgtcccgcaaaaacgcccgtcttcttccggcaaggggttccactcactgtccggcccatagtaattcaaggcgccataagcaaatacctcttccggattttgcccgagccaccaattgacgagatcgaagtgatgtgttgatttatggacagaaagaccgccggaaaactgtctcgacctgttccagcgtttaaaatagctggcgccatgatacgtatcaatataccaatttaaatcaacagaagtgaccctgcctatttttccgtccagaatcatttcttttattttccgatgaaacgggctgtagcgatagttaaacgcgacggtgacttttccttcgcttttggcctccgcttcaagcacccgattcgcatcctgcactgttgtcaccattggtttttcagtaatcacatctgtattccactgaaggctttttacaatatatgcgacatgcgtatcgtccctgcctgccacaatgacgatatcaggctttgagacgcgcatcatctcgtcaaaagcatcttcgctaaactcaggcacgtgggccagctcgggaaatttcttcttgcaaacggcaaaacgtttcggatcggcatccagcaatcccgtaatctcataatgagttgaaaaccgctccatcagtggtttgataaacatactgaatgctctgctgctcaatccgcaaaagacgatgttcttcaatatcctcacctctatcgggcttcagttagttgagaaatcagctgcagcgcttcctctgttttttcagcatacacagggataaacgccgccatatcgcgattcaattgaaaagaatagccgttcagctgttttttccctttttcgatctgaacggcatagatcgttttttctcctgtttttttattaacagttgtataaggagatgttttttcaggaggcaatccgtttaacggctgaaaattttccggatcatcgtaagcttgaaacatgtcttcaggcacgatgaaaacatctccctcatgggcggtaatttcagtcagcagtttttcctgaaaagctggaaagatatcgaccttcccggcattctgctcggcggccttttttattttttcctgtacgccagcctgcatatcagaaaagagaatgacatgcattccgtccggcctgcttgagcatgatgccaaaaagagcactgagacgatcacacacaaagccgtacgtatcctttttgtcatttccccgctgacctaaaaagaggctccagctctgtcatagctaaaataaacgcgccggctccgtgcagatcgtttgtgcttctttcgcggctgacataatagtcatagaaaccggctgacgttccgacacatatgtctttgacgagaaacgctccgtcttctgatgtttcggttttatgctgaatcaagccttgatacgcttttagcagtgttgtttcgtaagctctgtctagatagcctttattgattccttttgcgattgcgtacatgtacagacaggatcctgagctttccagccagttatcagacctgtctcccttatcaacgatctggtaccataaccccgtctctttgtcttgatagcgacagatgcttttaatcatgtcctgcagcgtgtttttccacacatgacggttcggatgcttcttcggcagctcttcaatcatgtcagcaagagacatgacgtaccagccgatggaacgtgcccaaaattccggtgaacagcctgtctcttcattggcccaaggcatttttttcgcttcatcccaggcgtgataaaaaagtccggtttttgcatccttcgtatgctttctcatcaatgactcctgaagcacaacctgatcaaacagctccgtctcctgcttcagattggcatatttcagtgcaaacggcccccccatgtataagccgtcaagccacatttggtaaggataaccgtctttgtgccaaaaaccgccctcagacgtccggttcagtgttccatataagctgcgcagcctttttgccgctttgacataccgttcatccttcgtctgctcgtataatggaaaaagaatgagacctgcttgaatggcgtccagttcatctcttctaaataatagattgccattatcatcgattaagagatctgcataagccttcgcatactcaaaataccgcttttccccggttgcttcccacagccgcaatacaccgcataagaaaacaccctgatggtagtgccagcggtttgcaggtggcagctcctcgactgtgtacgtgttcataatggtgtttgccaatgcctccgcgtacgtaagaggcgattttacagcgattgattgatccattgatcccatccctttcctaataaattccttcctcgccaaatttcttcgccaaacgattcgctagcatgaccaaaatcagcccgaccgccgctttaaatacgccgactgctgtactgtagctgaattggccctgtttcagccctgcagtataaacatacgtatcaaaaatttccgccacttccctgttagtcgcatttaacagcaaatacacatgctcgaagccaagctccagcgtgtctccgattttcaaaatcagcaaaacgacgataacgcttttaatggcgggcagcgtaatatgccacatttgccgcagccgtcccgctccgtccattttcgccgcttcatacagctgggggtcaaccgctgtaatggccgccagataaatgatcgtcgaccagcccgcttccctccagataacctgcagaatatacaggggccggaaccattcttcgttcagcagaaaattgattttttcaccgccaaaaaacacaatcagttcattaatcaagcctccgtctaccgttaaaagcacaaacgaaagcgatacaacaatgacccaagacataaaatgcgggatataaatcagcgtctgaacaaattttttaaagagagcaatccgcacttcgttcaatagaagcgccagcagtatcggcaccgggaaaaatatggccaggttcaaagcaaataacacgagcgtgttttttaacaagagaaaaaatgtaggctcagtaaacagcctgataaaatgcttcagccccacccactcactgcccaaaatgccgaggaacggctgataatcctgaaacgcaatcacaattccccacatcgggacatacttaaaaagcaaaaaataaatacaccccggcaaaatcatcaagtacaaatatttttgttgaatcagcttgattagtaagcgctttcttttttcttttttaaaaatgactgcatcaacagccggcgcttgcgcttctgctgttttcattttttcctagcctcctttcacggattcttgcattcactgtagcgcagcaggcaaaagtccgtctacaatcatatgatcacatcctgttttatccctttataatcaagggttcagccggtccacctgaaaaaaagacaccgatattagaaaatgattattgacaatatctatcaatctttggattaattgtattaaggtgaagtggatgttatgaaatggggggttttatgaaaagaagccaatacaagttttactacaaactgatcacgtttttctgcctgctcagcaccattccggttattttggtcggattattttcgtacgagcactctcagaaaacggctatttccaacgtttcggaggaaaaattcgacacactccagcagacccagcaaagcatcgagcatatattgaaaaccgtcgatcactctttaacccactatgtgagttcgccgcctctccttcgcacattgtccgagcctttgcactcagaccaatttcaaatctataaccaagtgaaccaagagctcaattatctgcaaagctttgataccgatctgtccaacatgacgttagtcagttatacgaaaaaatggtacatgaacaattccggtttgtaccgtttgaatacagacactcttcatgaagcagcctcagcgtacacgaaacaaaaagcgagccgctcctattggacgcttgaggaaaacaatcatttgatttcaaccaaagaaggcacagcagaaaactgccgctacaatatcaatttaattaagcagcttcctttgaacagcacaaatacaaagggattggccgccgcaagcatcccgagctgttcgcttgtcaaaaatatgcccggctattcaaacgccaacaacctgtttatcatcgatgaaaaaggcctcatcatccttcataacaatatgtctgacgttggtgaatctcttcataacgacggctttgtccaaaaagtgctggcgcaaacggccaatagcggacagtttgaaacagtgattgaccggattcattataaagtcacctatcaaaaatctgactataatgcatggacttatttttctctcgtttccctgcctgagttaaaaaaagaagccaaatcaatcggctggatcacttttgcagtatgcctcattttgttaacgctttcattgctgttctcttggcttggctcccgccatttttacaagccgatcagggtgctttacgaatcattcgcaagacatggagccatacaagagaaacaacagcctcctcaaaatgaatttgagttaattgaacagagctttaagcagctgaaggacagaaatgacgaccttgaagaaacgatgaagcagcaggccactcatctgcagcaatattttatggtcaggcttatgcttggaaaactgacggatgaggaggttgataaccgttttgaaagcctcggcttaaagcaaaattggcggcaccttgccctgcttgtgctccaaattgacacactgaatcatacgccttatgagaaaaaagatatggatctgcttttgtttgccgtcaacagcctgattgagcgcaacatcccgacggacaaacatcttgcccccgccgtagttgacaaacagcaggcgacgattttgatcaatcaaagcgggacaaaggaagaattcatggctgagctgaatgagactgcaaggatgattcaggaaaaagcggaagctgagctgcagctgtctgtcagcatcggcatcagccagccgtttgatgtgctgacaaaagcgaaaacagcctatgcggaaggctcagaagcgttgaaatatcggctgaaagcggaaaacaagtcgatcatcttttacgaagaccttgaccagaaaaaaaccttcaaaacccattttccaaagcagcttcagcatgagctgttcgatgctgtcaaagcaggagacaaggagaaagcggataaatgcctgcacgcgattttacaagccattttcacccagaacaccaacccgtatcaatttcaaatcgccatcgcccgttttttgaaccatgtgattgagctgatgcatgtgcttgggatcgaattgtttgagcttgaagaaaacaaaatgctgtatgaccaaatttttgagctgaaaacgttcgaggataccgaaaactggctaaagaatgagtttattgatccgatgacagacaaagtgaacgcccgcgcggatgcccagtacaaaaatatttccgacaacatcattcatatcatccatcatgagtttgaatccgaattgacactggacgaaatcgcacgcaggctgcattacaacccaaattatttaagcagtattttcaaaaaagaaatgggaatttcattcagcgagtatgtctcaagctaccgacaccatatggcgaaaagctggcttgccgaaaccgacatggcggtcaaggacattgccgaaaagctgaaatataaaaactcccaaaacttcatcagatcatttaagaagctggaagggattacaccgggaaactaccgccagcaaaaaagaagcatgtaaaaaacccaaaaccgcttgcgcgttttgggtttttccaatgttattttgcttgtttaaacgcttcttcgtattcctgaataatttgttttcctccgcttgactcccatttttccacttctttatcgaactggctttctgtgatgtctccaatcatatatttgtaggtcgcgtcatcaatgattttcttcagttcgtcaccccgttccgactccgatgcggaatacaggctttcagccgggtttgagacgataatcttttcattgtcctcggtcagctcctcgtacgccgtccgaagcggatctccagtgttttttaagtaggctttatcaatggcaattaaagcggacagcggctgaatatcagtctgccagtcttttacctggctttctttgcgtgtaaacgttttgtcctcacctttgttgtaatgaacgccgtcaatgccataagtcatcaggctatagacatcttcttcggcaattcggtcaaaaaacgccaagatccgtttaagctcagcttccgttttcacactcgttttcgggaaagcaaacacgccgttatggcctcctgatgcccatacccgctctttcccatctgggccttttatgcggttgatgatctcgagcttcatcgatttatcagaggcatggtcgcgcagattgaccgcatctaccatattgccaatataaattccggcttttccttgagaaaacagctcttgctgctgggttttgcttgtgacgggaaaatccttattcatatacccgttatcacgcagctttttcatatagttcatcgtgtctttgtattcctgtgtcatgaaatcaggcgtgaatttgccgcccgattccttccaatctgtcggcatgccttcatacgagccaatcgttttaaacgcgccgtaaatcaagtcattacggtctgccagcccgaatgtatcatctttcccatccttgtccgggtcgtcctccgtaaatgctttggccacttcataaagctcatccaacgttttcggggttttcaaatttaaattgtccagccagtccttccgaatgacgatcccctgtctggaaagcgggcgctctctgtatatcccgtagagcttgccgtcaattgtcacatttttattaatgagtttgttcattttgtttaagttgggataatccttgatataatcgccgatttcccaaaacattcctgaccgaaaggcattcatgactgacgaatttttaatatcctggatggtcacgatttgcggaagattgccggctgcaagcgctgcattcagcctgtcttctttcaccgcgtctggaacccaggtgatgtcgagttctgtatttgtcagcttttcaatttctttaatcgccctgtctttcggcggctgctggtgatacaaaatcgccatccaagacagctttacctttgaatctgggccagctttgccttcagccgaagactgatcagttcctttacagcccgccagcactccgccgagtgccagtacaagcacaatcaaaagcaccctccatttgtttcccatcgtacccctccgtttcatatttctttatcctttgacagatcccagcaaagctccttttgcaaaatgcttttgtataaacggatagacaagcagaacagggatggtcgccaccactatgaccgccattttaatggtttgctcaggcggcgggctgcccgaccccatttcagacatatccccctgcataccgcttgatacaatgacgatttggcgcagaagcacctgaattggccattttgctgaatcatttaagtacaagatcgctgtcatatacgtgttccaatacgtgaccgcataaaatagtgaaatcgttgcgatcgcaggaagagacagcggcagcacaattttaaagaatatgcccagatcattgcacccgtcaattttcgcggactcttccaggcttgacgggatattttgaaagaagtttttcagaatgatcaggttaaaggcattaatggctgtcggcaaaataagcgcccagtaagaatcgagcaatccaagcgatttgaccacaaggaaagtcggaatcatgccgccgctaaacagcatcgtaaatacgacgagaaacatgagcggctgccggccgattaaatcacggcgggataacccgtaagccatcagtgacgaaagaaacatgctgaccgcagtgcctatcactgtcacaaacacagaaacaagcaaactcttataaataatatctgttgaaaaaatgtagcgataagcatctagcgaaaaagtggtcggtattaaaataaattttttcgacacgacttcttctactgtggcaaaggatgctgcgataacatgaatgaacggaagtacgcatattaaagcgaacatcagcaagaaaccataaatcaacatatcaaacagacggtttttcagtgaatgtgcgatagctcccacctccctttgtaagcgttatcatatttttggaaaccgagctcagcatgtgacgatatcgtgtctaaaatgtagcaaatctgtgattgccatgtctataatcatttgaacagtgtccccggccgggcgggggctgccgcgaattgagaccgataacaaaagaaaaagagcataatcttagaaaatgattatgctccgttctcctcctcgttcagaagttcagccgtattgatttgtggcgaaaacccaagttcattcacggcagattcaatggaccatggccggcccggattatcagagacggcgtaataagtgccataccggatgttggtctcaatggcggctttgaaaatcgacagcagatcggggtgagaaagcagtgtctttttcgtccgttctttttcatgcagcgtatccatttcatctgtcacgactgttccgattcgaaggttgattactgatagcttattttccaaataaaacaaatggccgatctgttcagaggtcagctttaatacaccgtacaagttttttgacagcggataatcgcttgttgtgatttcccgtcctaagagcgagcgcccgtctttttcatatacatctgtgacatgattgctgctggcgaacacgagcttttgaatgccgagctccgctgccgcacggcacagataatagcttgccctatagaaaacatccgtcattttttcaaactcagcgatgtccataatatcgtatttgattttcacagcgagtaaattcaagatggcatcggtatcttttggaatcttcttcaacagctcctcataatttgccgcgtcagcctgaatggaagaggctttgccatcgaaatgatctttatcaagcacagtcacttcatagtctgaaataagcccttcagcaagcagtctcccaatcacaccatttccgccggcgatcagcacttttttcacgatgttcactccccttttttatagattgcccattttcggcggggctgacacttttttggcactcacattcttaggcttattcaaaagtcaccggcagctcctcaagcgcccgaaatccaaaaagcggccgataccgccattcaaaatccgcaagattaaggctgggcattcgctgcagaagagtgttaatcgcaatttgcgcttctaatcgtgccagcgaggaccctaagcaaacatgatggccatgcccgaatgaaagatgcggattaggacttctcgtaatatcgaagacatcggggttcgtgaatatgctagggtctcgattagccgctcctaacaaaagatagacttgttctccttgacggatcgtcaccccgcagatgtcaatatcctctgacgcaactctggctgtcatttgcgtggggctttcatagcgtaaacattcctcgactgcggtaccaataagatctggattttctctcagtttcaaaagctgttctggatgctgcagcagacaaaggactgaattgctgatgagattgaccgttgtctcatgtccggcgatcgccagcaatatgcacgtagatgccgcctcctcttccgtcagcttatccttttctctccccttcaagagcatgctgatcatatcctgttgagggtggcgttttctcttttgaatcagctctttgaaatatgccatagcctgcacagccataatattgccctctgttaatgcctttcttgagcgggtaaaatcaatcgtttgaatgagactcgcagcccactcctttaattgctccctatcttcctccggtacacctataatgttagctatgacaaaacttgctaaaggaaaagcaaagtccgaaatgacctccatcttttttttaccttgcacttgatcaagcaaatgatggacagtttcaatgatatacggctgataactctctgtcgttctcggcgtaaacgctccgctggcaagcgtccgcaatcgtctatgatcaggctggttctgaaacagcatcatttgattttgcacatgtgaaaggtcctgatatttggttgagctctcaggcagcggggtgcggactttgaatctcgcatctttcaaaatagcagccgtttcttcatatcctgtgacataccagcccgggtattttaagaaactccctttatagataggatgaacagctcgcaatgtgtcgtaaaaagaatatgggtttttcaaaaactcagaagatgcagttgacgatgcaattgtcacgtgattttctcctttctgttcaaaaataaaaacaatcgacatcataccgattgcttttattgattctttcagcttttcgcacttaaactagccttcatttcttcgactgattcaacttcaaagcctaaatcactcagcattttatgatcctccgtctcctcttgcccggcagttgttaagtagtctccgacaaaaatggagtttgcggcgtaaagccctaatggctgcaatgtgcggagattgacctctcttcctccggaaatgcgaatttcttttgatggattgataaaacggaacagcgccagcacttttaaacaatacagcgggtttaattcgttgacgccttctaacggcgtgccatcaattgcatgcaaaaaattcacaggaatggaatccgcgtcaagagccttcaagcttttggcgatgtcaatgacatcctgtttcgtctccttcatcccgataatggcgcctgaacacggagacagccccgattcttttgcgatttcaaccgtattgactctgtcatcgtatgtatgtgaggttgtgatgtttgaatggtttctctgtgacgtattcaaattatgattatagcggtctactcctgcatctttgagccgcttcgcctgctctggcttcaacagtccaagacatgcacaaatcttcagtccatacgtctctttaatttcctgaaccgcatctacgacctgatccacttctctgttagacggacctctgccgcttgccacgatacaatatgtgccgatattcagatcgtgcgcccgcttcgcgccttcaagcagcgtttccttattcaccatccggtaagactcaatcggcgctttcgaaatcgcagactgtgaacaatagccgcagttttccgggcagagcccggatttcgcattcataatcatattgagctttactttttttccgtaaaagtgttttctgatgtgaaaagccccgtgcattaatagcaaaatatcttcatcaggacaatgtaatattgaaagcgcctcttcgtcagtcacttctgctccagccagcacccggtctgcgagttccatccattgattcattctcatacccccacttgattcatcagtaatgatagattgatatggtcttttaccatatgtagaaccgtttctttcgtcacgttggcaagctttggcgtaacccctaaaatcggcacaccgcataagcgctcaatcatctcaggattggttttttcatcttcatcaggagagtcactgattccattgatgataattccggcgattggaagccccatgctttctgcatatttgacagttaaaaaggtatgattaatggttccaaggcgaggacgcgccacaataatcatgggaagctgcaacgcttttatgacatgactgaccaaatagtcctctcccaatggcacagaaataccgcctgcaccttctacgatgaagcattcatgtttttctctaatccgcccccaatggcttaaaacctcttccatggtgacagtctttccctcaagtttccctgcaacgtatggtgcaagcggcgccttgaaggcaaaaggcgtaatgtcttcatgagaaagactggtctgcgacatatctttcagcaaacttgtatcactatctggatgatggcgcgatatcccgcttaaaaatggtttatacaccccgacatgtctattattgtctttcaataaggcagcaagaccgctggatataaccgttttccctacttctgtatcagttcccgtcacaaaaaaacccctcaaatgatgtgcagctcctttccgattgaatgaaatgtttgcagcaaatgatcaatatcacccatactgtggtcagacgtgattgtaattcgaatccggctttcacccggcgcaacggttggcggccgaatggcaggagcataaattcccttgccctgcagtttttcagcaaataggaccgttttatgggcatcgccaatgactacaggaataatcggtgtgtgatctcctttcaccacataacccatattcttcagactggttctgatcatgctgatataagaaaataaaagctgtcgtttttccctgctggcttcaatgatgttgaaagcctcgtgagcagccgcacagctggctggcggaatagcggtttgaaagataaatgttctggcatggttcagcaaaaagtcgatgaagaccgctgatcctgccgcaaaacctccttccgcgccaacagctttgcttaaggtgccgataacaatgtcgggacaaacaccaaagtattcactcgttccttgtcccgaatcgcccaaaactcctgttgcgtgggcatcatcaacgaccacgaaggcatgatagcgtttcgcaagtgagatgatctgatcaagaggggcgattgtgccatccatgctgaatactccgtctgttacgataaaacggcgctgataacgctgtgtttcattcagcttgttttcaagatcattcatatcaatatgccgataaacaactgtatcagccttagaaagtcggcagccgtcgatcatacttgcatgattgagctggtcacttaaaatgacatcttccttttctggcaaggatgaaaggacaccgacattggccaagtaaccgctcgaaaacagcagggccgcttctgtcagtttaaagctggcaatcttcttttctagcttttcatgccagaccgaattgcctgtcgttaaacgtgaaccgctgcttcctgtcccaaattgctgcaatgctgtttgggctgcatcgatcaaacgtctatcgcttgcgagccctaaataattgtttgaggaccagaccgtttgattttcgccatcaatattcctctctggaaccggcgctccatccattgaccgcaggttacgatgtacgccggcttctttcattctgtctaaccgctcgtttaaccaggaatcaatcttcaaggctcgtaacctcgtggatcgcttgtttcataatggcaaccatttccgagagctcttcagctgtgctggcaagaggaggaagaaatgcaatcacgtccccaagcggtcttgtcagcattcctaactctctcatttttaaggaaactttgtatccaatccgccgatcagccgggtaaggttctttagtttcctttgatcgtacaagctctgcaccgcacataaagccaagctgccgaatatccccaacatgaggaagagcgtgcagatcttgaagaagaaaatggagctttttacttttttccgctacttgttccacaatgttttcagattcaaataatgccagattttcaagcgcaaccgcacagccaagctgattgcctgtataggaatggccatggaaaaaggtttttaggttttcataatcatcatagaatgccttatagatgtcttcagtggcaaacgtaacggcaattggcaaatagcctcctgtaatgcctttaccggcagccatcagatcaggctggacattctcgtgctcgcacgcaaacatttttcctgtacggccaaagcctgtagcgacttcatcaacgatcattaagacatcgtatgttgtacatagctcgcgcacgcctgccaaatatccttccggcatcacgatcataccggacgcgccttgtaccattgattcaatggaaagcgcggcaatttcctcatgatgttcctcaagcagctgtgcaagctctcggaggcactgatcacggcactcatcaggatcaccgctttcagaacgatacacataaggaatcggggccttgtaactctcgaacatcaacgggccgtatacgtggtgaaaaagctcaattgaaccgacactgacggcgccaatcgtatcaccgtgatacccgtttttcattgcgatgaatttttgtttctcgggcttcccgatgttcttccaatactgaaacgccatttttagggctatttccatcgcctctgcgccgctgtctgaataaaagacccgcgtgagcttttttgggctgatgtcgattaatgtttcggcaagctgggttgctggaacattggtcatgcccaataacgtggagtgcgcaatttttccgagctgtttttttatggcgtcatctagttcttttttgcggtgtccgtggacattaagccaaaccgatgaaaaaccgtcatagtattccttgccgtttatgtctttgactttgattccagtcccgctttcgatgattaaggggttttcatcataatctttcatttgggtaaatggcagccagaggtgctttttacttttttctatcaaatcatgagtcatgatcttcctcccactctattaaaataggctgcttctccaggtcatgtatgtacgtgtttacatcattggatccatcaataaaaaagactcggcagccctcttcagtcccgtattctttcattgctgtaatacgctgatagcccattttcttacccgcaacatagcctgttatgtaatccggatcgtccgaccagcataattctgcaacgactgccgggtgccggcttacctttgaagcgagcgcaagggcctcttttattcttgaatgagctggcacgtgactgtgaagcgcccatttttcaaaattagcgtccggccaatccattctggagacccgcacccctttttcttttgtttgatccattcgcttgcctgtatgaatatcaaacaacaccgcacccctgacatctgaccattcagggatttgttcatatgctttttcaatcacgtctcgtgaaacgccttctttttccaataacaatcgggcaagcttttgtccttcttccgggcagctcacttcattcgtatgcacaggcaatggctgaatggtttttatcgattcatgtacctcttcaaattgaatttgcataaaatcaggttttcctcttgaatgggataaccctttttctaataaagcattgactgtatgcttcatctcatggaaaggaataagccgttctccgccggatatatgctttccgccgtcttcatgagatccattcattgaagccctcattctgacactataaaaagtttcttcttgcatcatttctcgccctttcactgataactgaagaacgtgtagcgcttctcacctaaattgttaaccaattatattcaaaggttaacaattagaatatattattctctcctgtttctgtcaatagaagaaaggatcgatttatggcagttggttaaaaggaaacaaaaagaccgttttcacacaaaacggtctttttcgatttctttttacagtcacagccacttttgcaaaaaccggacagcttcatgccttataactgctgtttcgaaatgtcccgaagcagaacggaccactcggtagcaatcagcagctccctgtccagcatagacagctgtcaattctttttcgattttgtccacgccctcagccggcgttaaccgatcgtgtacaccaacaagactaaggtgcgggcgcggcgcgatcaggctttggatctccgatgcggaaaaatgctttgcaagcgatgggacgtaataataaaagccgtgcctgtcaagattctgtgttttgatcagcacgtgatgatccacctggctgcacaaatccacacacaccttaatccggtcatcgagcgccgctgtccaccacgccatcaaacctcccatagacatgccgatggttccgatcctgtcaggctgaacatcagagcgtgactgcatatagtctaacgcacttaaactgtcataaatcatcatcccccacatcacttttccggtgagaagcatttctttaaatatctcgctttccgcttttccccgccgatctccaaacccccaatgatcaatcgcaagaacgccgtatccgagtgaagtaagctcatcagaaaaagaaggcgttttcaaataatccgctccctcaatcagctcactttttcccctatcatactggcctccatgcgaatgctgaaacaatacggctgggcacggtccttctgttttcttcggcttcacaaaataagcgggcgccttttcatgtccatttaaatcgagcaggagcgtttcaacgatattttcttctctttcttcaatacgtaatgtctcaacactgattggcctccgatcaggcaaatcaccaagcaatcgaaacagttgctttcttctttcggctctcatcccatcacccttccttattcgcttacttcacatttacgagacagatctgggttcccctttatttttccaacataaatcacatcatttactaaatatttagtaaatattatggaatatttcgaaaacaattattgtaaccgcttacttttatatgataatatcaatttatcaaaaacagatgagttaatattttactaaatagatgagagggatacccatggttcgtattaaagatatcgccttgaaagctaaagtttccagcgcaactgtgtccagaattttaaatgaagatgagtcgctttctgttgcgggcgaaacgagacaaagagtcatcaacatcgctgaagagcttggttatcaaaccgttgccaaacgccgaaaatcccgcgggcaaaaacagcgggctcagccgctgatcggtgtgctgagctgtctgtcccctgatcaggaaaggcaggacccttatttttcttccattcggaaagggattgaaaaggaatgctttgaacaggaaattttcattacaaattcgattcatctcggctcctttcaggaacatatctttcgggaattggatggtgtcattgtcatcggccgtgttcatgatgaagcggttaagcatatcagcgggaggctggagcatgccgtatttatcaatcattcaccagatccgcaagcatacgattcgattggcatcgattttgaatcggcttcacgccaggcgattgatcaccttttcgacttaggctacaaacggttaggctacattggcggacaagaaaaagagcatacgctgaaggacggccaaagcattcgcagaacgattgaagataaacgcctgaccgcttttttggagtcagccgccccccagcctgagcatgtgctgatcggagaatacagcatgcgtgagggctatcgcctgatgaagaaagcaatcgatcaaggccatctgccggaagcattctttattgccagcgattctatggcgatcggcgcattaaaagcgctgcaggaagccggactgcaagtgccgcgggataccgcaatcgtcagctttaacggcattgaggaagctgaatttgccagcacgcctttaacgacggtgaaggtatacacagaggaaatgggccggacaggcgtaaaactgctgcttgaccgtctcaatggccgaacgcttcctcaacatgtcaccctgcctacaacattaatcgtaagacaaagctgcggatgtacagcaaaggaggtgacataagcaaagattcatcacgatgataaggaggaaaagatgaaacacacttttgttttatttctctctcttattctgcttgttctgcccgggtgttcagcagagaaaagctcagcagataccgcaaaaaagacgttaaccatttattctacaatgtcaaccgacagtgaaagagatacgttcagaaaactagcggcagcattcgaaaaggaacacagtgacattcatgtcagccttcatttcccaggcaatgactatgaaaatatgatgcgtgtcagaatggcggccaatgatttgccagatctattcgatacacatggctgggggaaaatcaggtacggagaatatacagcggatctccgggatatgaaatggactcaagatcttgatcccaatttaaacagcatcctcaaaaataaaagcggaaaggtgtatgcctatccaatcaatcaggcaaaagacggtctggcgtataatcgcaatattttagaccgttacggcattgctccgccggaaaccatggatgactttatcaaagcactgagaacgattaaagaaaagagcaagggaagcattgttcccttctggtttgccggatatgacaaaagctcattcgcccaatattacgaccaattcgctacacctcttctcatcacagaccctgcccataatgaaaaaaaacagctcatcaacggcacttttcaatggagtaaattcacttatttatcagaaatcctcaaacaaatgcagaaagaaaaattgatcaatatcgacgccgtcacggcaaaaaaatcacagctcattgaattaatggcccaaaacaaaatcgcctttacaatgcaaggcggcacactcggccaagacgttgcccagatcaacccgaacgtcaaggtcggcattatcccgacacctgccatccatcccggtgatgacccgatatggatcggcggtgaacgctacacccttgcagcatggaaagattcgcctcaattaaaagaggcaaaagattttatcgcatttatggcccgcccggccaatgccaaacaaatggctgaagccacatcgcttccttcagggctgaccaatgtgaaagctgatattttctacgcaaacgattatgagtattatcaagatgtcaaagtcgagccttacttcgaccggttatacttgccaaacggaatgtgggatgtcctgggcacggttgggcaggagctcgcggctgacattttggcgcctcaagacatttcgcagaagctgggaagagaatataaacgactccgggagcaatccgaaacacagggagctgaaaacaatgagtgagatcgcaagggacgttcatgtgaaacaggttaagccaaaaaagcagtcctcactttggtggatgtacattcctgctttgctctccgttctggtctttatgatttacccgtttgtgaaaggcacattgattacctttacaaactggaacggattttcacaagtctaccaatgggttggattcgcgcaatatgaaaggctgttttctgatcctgatacttggcatatcttaaaaaacacgctgctttacgggcttggcagcaccttttttcaaaatgtggtcgggcttctgtacgctctcctcttaaatcaaagcattaaaacgaaagcggtaacaagaacaattgtgtatttgccggtgatgatcagcccgctcattatgggctacatttggtactttttcttctcctatgacggaggcgcgctcaacgatttgctcggggtcttcggcatcagccctattaatgcgctcgccagtccctcgctcaatccatggatcattgtcatgattaacacctatcaatatgtcgggatcgctatggttgtctacttagccggtctgcaaagcattccgaaagactactatgaagcggcgcaaatggatggcgcgaaacaaggccagcagttttttaccatcacgctgccgctgttaatgccctccattaccattaatatagtcatcaacattatcggaggcttaaagctgtttgacgtcatcattgcactcaccgcaggcggccccggaaatgcgtcacaatccatgtccacgtttatgtatgatttgtatttcaaacggcaggatgccggctatgccgcaacgcaaggcatatttatggcatttgtcattttgatcatcagcttttgcgcgcttgcgtactttaaaagaaaggagacggaaatgtcatgagagccgcccgtacaaaaagcatgcggatcattacgcttcttgcagccattgtggcctgtgcgcattttattcctttttatatcctgctgaccacttcattgaaagcaaaaggagactacagttcgaaatggatatttccagccgacatctcctttcataatttttcagaggcgtgggagcgcgcttcgctaggaaactcttttataaacaccatgatcatcacaggtttttctgccttgttattaattatattcggctcacttgccgcctacccgcttgcccggcgggaaacgaaactgaataaagccgtttttgccttgctgatttccattatgatcatccctccgttaacgtccatggttcctttgtaccgaatggtcgtggacgccggaatggtcaatacacacgcaatcgccattttcatcaatacagcggcttacatgccgttaaccgtattcttatattcaggctttatccgatcgaccattccaaaagagcttgtagaagccgcaagaattgacggtgcaggcatgctgaaaatcttttttacgattgtgtttcctctgctgaagccgatcactgcgaccatctgtatcatttcttgtgtctttatttggaacgactatcaatttgccattttctttttacaagatcaaaaggttcagacattaacagtagccatggcaggttttttcggagaaaacgcaaacaaccttcatttagttgccgcagcggcacttatggcaatgctgccgatggttgttctgtttttggcgctgcaaaaatactttattgccggcctgtcttccggagcggtaaagggttaacattaaagggggaagcaatatgaaaaagattacatttatcggtgcagggagcacgattttcgccaaaaatgttttgggagactgcctgttaacagaggcactgaatggatttgagttcgctctttacgacattgatcccaaacgcctgcaggaatcccagctcatgctcgaaaatctaagagaccgttataacccaagtgtggccatcaacagctatgatgacagaaaactcgccttgcaaaacgcaggctatgtcatcaatgcgattcaggttggaggatacaaaccgagcacagtcatcgatttcgagattcctaaacggtatgggctgcgccagacgatcgccgatacagtaggcatcggcgggatattcagatctctcagaacaatcccggtcttatttgatatcgcaaaagatatggaggaaatgtgccctgacgcatggttcttaaactatacaaatccaatggccactcttacaggcgccatgctccgctataccaatatcaaaacaatcgggctctgccacagtgttcaagtgtgcacgaaggatttatttaaagctctcggaatggagcatgacggaattgaggaacgcattgcgggcattaatcatatggcttggcttttggaagtcaaaaaagacggcacagatttatatccagaaatcaaaaggagagcgaaagaaaaacaaaaaacaaagcatcatgatatggtgcggtttgaattaatggataagttcggctattatgtcacggaatcgtccgaacataacgcagagtatcacccgtactttattaaacggaattaccctgaactgatcagcgagctgcaaatcccgctcgacgaatatccgagaaggtgcgtcaagcagattgaaaattgggagaaaatgcgggatgatatcgtcaataataaaaaccttacgcacgaacgctcaaaggaatatggttcaagaattatagaagcaatggaaacaaacgaaccattcaccttcggaggaaacgtcttgaatacagggctgatcaccaaccttccttcaaaagcggttgtggaagtgacatgcgtcgccgacagaaaaaaaattacaccgtgcttcgccggagaactgcctgagcagcttgcagccttaaaccggacgaatattaatacacagctgatgacaatcgaagcggctgtcacacgaaaaaaagaagcggtttaccaagctgcaatgcttgatccgcatacaagcgcggagctttccatgaaggacatcatctccatgtgcgacgatttatttgcagcacacggcgattggcttccggaatacaaataaaaactaggggaccgctctcccctagttttttggttttgtttcgccttcccaggccatcatgccgccttcaacattgactgttttaaagccttgctcatccaggtacttgcagacgttcatgctgcgcattcctgagcggcagataaatacgtactctttgtctttatcaagggtttccattttttcaggaatatcccccatgcgaatatgaacggcttgcgggatcatgccttccgctacctcttcatcttctctgacatcaattaaatataattcttcgtccgcctcaattttttctttcaaagcggctgtgctgatttcttttatttccaaagaaaacactcctattcacagtgatcatgttcagtatatcaaagtcagccgaacgattgctattctgagactgatgaaaaaaaatccccttttggcaaaggggattttttctaggcttagtttgccacaatattgacaagcttcccaggcaccgcgatgattttccgaatcgttttgccttcaagctgctctttgaccttttcatctgcttgagcaagctgttccagctgttctttcgttgcatcggcaggaacctgtaatttcgcttttacttttccgttcagctgaacaacgatttcaacttcatcatccacaagttttgtttcatcatatacaggccaagcttcgtaggcaattgtgccggaatggccaagcttctcccatagctcttccgctaagtgtggcgcgacaggagaaagaagcttcacgaagccttccatatattctttcggcagttctgttgctttataagcttcattaataaagaccatcagctgggaaatacccgtgttgaaacgaaggccttcataatggtctgtgactttcatgaccgtttcatgatagacgcgctccaatgtttcacccgcgccttcaacgatttttccattaagctcaccgctgtcttcaataaataggcgccatacacggtcaaggaaacggcgcgcaccgtctaatcctgattcagaccaggcgattgaagcatcaagaggtcccatgaacatttcgtacaatctcagcgtatcagcaccgtgagaggccacgatttcgtcaggattgacaacgttccctttagatttactcattttttcgttgttttcgccgagaatcattccttggttgtacagcttttggaacggttctttcgtcggcactacgccgatatcataaaggaacttatgccagaagcgggcatacagaaggtgaagcacggcatgttctgcaccgccgatatacatatcgaccggaagccatttttccaatttttctggtgatgccagctgatccggattgtgcggatcaatatagcgcaagaaataccagcagcttcccgcccattgcggcattgtattcgtttctcttcttccttttttccctgtctcagggtctgtgacttccacccactctttaatgttcgcaagcggtgattcgcccgttccgctcggtttgatttcatccgtttttggcaaaatcagcggcagctcctcttccgggacagctgttgacgttccgtcttcccaatgaatgaccggaatcggctcgccccaataacgctggcggctgaagagccagtcacgaagacggtacgtcactttcttctcaccgtttttcgtttcttccagccaagcgatcactttttcaatcgcttcctgtttgtgaaggccgttcaggaaatcagagttcacgtgctcgccgtcgccagtataggctgcttcctcaacgttcccgccttttacgacttccttcaccggaaggccgaatgttttggcgaattcaaaatcacgctcatcgtgtcctggaactgccatgacagcacctgttccgtatgatgcaagaacataatccgcaatccaaatcggcagtttttctccgtttacaggattgatcgcatacgctcctgtaaatacgcctgtctttgttttcgcaagatctgtgcgttctaggtcactctttgattgaatttctttgatataagcttcaacagcttctttttgctctgccgttgtgatgttttccaccaatgcgtgttccggggcaaggacagtgtatgtagcgccaaacagcgtatctggtcttgttgtaaacactgtaaaggaatcatcatgtccatctatagcaaaatgaacgtgagcgccttccgaacggccgatccagttgcgctgcatatctttaatgctttccggccaatcaagctcttccaagtcctcaaggagcctgtccgcataagcggtgattttcagcatccactgcttcattgggcgtctctctaccggatggccgccgcgttcgctcttgccgtcaatgacttcttcgttggcaagaacagtaccgagcgcagggcaccagtttacaggcacttcgtcaacgtaagcaaggcctttttcgtatagctttaagaaaatccattgcgtccatttatagtattcagggtcagtcgtattgatttcgcgatcccagtcatatgagaagccaagcgcttgaatttggcggcggaagttatcaatattctgcttcgtaaacacagcggggtcgttccctgtgtcaagcgcgtactgttcagctggcaggccgaatgcgtcccagcccattggatgaaggacatcatagccctgcatgcgcttcatgcgggacagaatatccgtagctgtgtatccttcaggatggccgacgtgcaacccagctccagacggataaggaaacatgtccagcgcgtaaaatttttgtttttcattattatcaagagtggcaaatgttttgttttcaagccaatatgtctgccatttcttttctatctctttgtgctgaaaactcaaagtaaaaacctccttctgattgaatacggcgtgtatggttcaagtattgacgggaaggagaggattatattcagaatattcccaaactaaaaaaaactccctcatcccaaaaagggacgagagactttcgttttcccgcggtaccaccctcgttagcgcggcatacgccgcactcacttgatacttttaacgcagttatgcgtcagcggcttttcaccgctgcaactctgaggtgagttcggaaacaaacttgattgactttcaccagccgtcaactctctgcaacaatatctgtttcttactgctcctcttcattgttcttatcgcaaccgtaatctaactgtattttatagaattctgttcataagtgcaagcaggtttgtatacaatgggaatgtaccctgaacgggcggagattgaggacaattattcgggtggagttttggtttgacgtttggactcggccggttcgccgccgctgttcagttctctcacaaagtcaaaacttctgagaacagcttcaccgccgtagcctgagataatggataagatgacaagttgaattcctgaatcggggtcagcggataatacaagtaaaatggaagccgtcatgccgataaaccaatcttccaaaaatccaaggtagataaaccgcttcgtcattctgggcttctccagcctgcctctctttttcacatgaccgagaatccccatgattcctccaattacacaagcaatgagtacctgatgcagcatcttcatcatcaccttcctaaagcccttatttcgtaaagcgacttcaggccatccagcccccttaaacgattccgatgattttcgatatctacataccggcaaatctgtaaaaagcttgtttcttccattatatgtgaacacatgatcggtaagcttgatgcattggattcatttttcacccagtgacattgacctagtcacctatttagcatgtagaaaacctttccgttcatatgttcaaattctgttcttatttttagtgtatacgaggacaagccctaatgacaaacaacaaactgcacttgcttgaatcagaacatgtgttgtgctacggttactgtagaattcatttttaaaaaggggaatatcaggctttcgcatagcaagctgacggcctaagggggatttatatggctagttttcaatcatttgggataccaggacagctggaagtcatcaaaaaagcacttgatcacgtgcgagtcggtgtggtaattacagatcccgcacttgaagataatcctattgtctacgtaaatcaaggctttgttcaaatgaccggctacgagaccgaggaaattttaggaaagaactgtcgcttcttacaggggaaacacacagatcctgcagaagtggacaacatcagaaccgctttacaaaataaagaaccggtcaccgttcagatccaaaactacaaaaaagacggaacgatgttctggaatgaattaaatattgatccaatggaaatagaggataaaacgtattttgtcggaattcagaatgatatcaccaagcaaaaagaatatgaaaagcttctcgaggattccctcacggaaattactgcactttcaactcctattgtcccgattcgcaatggcatttcggctcttccgctagtcggaaacctgacagaggagcgatttaattccatcgtttgcacattgacgaatatcttatcaacatccaaagatgattatttgatcattgatttatccggattggcccaagtgaacgaacaaacggccgaccaaattttcaagctgagccatttgctgaaattgaccggaactgagttaatcattactggcattaagcctgaattggctatgaaaatgaataaactggatgccaatttttcgtcgctgaaaacatattcaaatgtaaaggatgccgttaaagtgcttccgattatgtaaaaagatcccgctcacccagctggatctttcagattgttgacaaaatcctaaaatggttttcattttaggattttgtcatcttttcagcgtgattgaaaacccttgaagtctaggaaggacgagcataggagcggagcgaatgttctaattcgtgagcaccgaagcgcaggcctgacaacgaatgcgagggtttgtcgacacgctgaaagatcccgctcattcggcgggatcttttattatgaagagattgatgcctgcttatttgtttctttagctgattttatccgtttgtcatatagaagcgttgtggcaatactgatcagcagcaataccaacagagataaaacaagagccctaatgccgtaatgatcgacaagcactcctccgaacaggggaccaatcattctgccgcctgtcgccgcactgttgacaaagccttgataaaagccttctttccctttaggggcaagctgattggcaatagtcggcacagcaggccaaacaagcatttctccgatagtcaggatcaccatcgcagcgagaaacatcggaaattgctttgcagtcagcagcatgctgaaagacacaataaaaatgataaagccgatgaccatttgcgcttttagcgactcggcccattttttcaccacaaaactgacgagcggctggccgagcacaatgagaattccgttaaccgtccacagcacgctgtataaggaaagagatattccaatgctttgtgtgtacgaagcaattgtggttgaccactgagaataagccagccatccgagtacatagcctccgcttaaaatgatcagtgcggcaaattttgctttgctgttcacagcatcataatcaagcacggatgtttgggatgcatcgcccgtttgaatatttcgaaatccgaaatatacaataaagaaaaagatcagatacaatacggcatttgccaaaaatacatatgaaaacgagaaagatgccacgacaccgccaagcgctgaaccaacggccacgcccgcgttttgcgcgacatatatcgcattaaatgccttccttcccccttcaggccataccgatcccgccattgcgtagcttgccggaaaaacaacaccggagccaaagcccacaatcgtcagcagcacaatataggctggccaatcatgaaaaaagacaagacccatcaggcttgctaacgtaatggctatcccaagcataatcgatttaaaaccgccgattttatcaaacaaaaaacctccgcataaattgccagccacactggcgccggaattcagcatcaggacaagtccggctactgttaacgactttcctaaatgattatggatataaatcgtattcagcggccataaaaaagaagcacccgtcacattgataaacattccaatgactaaaattttaagagcacgcggcatactcatccccctttcttacctaaaaaagctcatgaaaaaaacgaaacctaaaacggctccgtacgaatccagttatcatagcacattcattctatctgtctctctcacatttttcaactgatgagcgtgaaaaaatctaacaaatattgtttgaaaaatgtaaaataaatagaaaaaggggtcatattatggaaatggtattagcattcttaggttttctggcatgtctcattgcactgggctatggattatatcaccttgtcagatatgtactgaaaaaggaaaaacgtttctcaaagagacttttttggccgcttttcattggaggccttgtgctgctctttaccggggcagcattggcagaacctgacactgccgcagcaaatgccgagaaaaaatattcagcgctaaacgccgaatataaaaacctcacaaaagagcacgaagaacttgagaaagaatataaatctgtcagctctgaagcaaagaaattaaaagacaacaaagaagatcaagacaagcttgagaagcttaaaaacgaaaatagcgatctaaaaaagactcagaaatcattaaaagctgagattaaagagcttcaagaaaatcaaaagcagctcaaagaagatgcaaaaacggcaaaggctgaaaatgaaacacttcgacaagataaaacaaagcttgaaaatcaattaaaagagacggaaagccaaaccgccagctctcatgaagacactggaagttcttcaaacaatacgagtaaaagtgatgaaaccaaaacagctgacaaagcagaaggctgtaatatcaaaggaagcagaaacggcatctaccacacgccaggcagtacatactacgaccggacaaccgatccggctgaaatgttttgctcagttgaagaagctgaagccgccggttatcgggcgccaaaacgataaacaaaaagctccagaatgtctggagctttttctgtttcacaacgacgatttaatgaccttcttataataaagaactgacagaaaaccaaaaatggagtagagcgcagtatataacaccatcaccataatcataggcgcccatacctctgatccgaataagaaccagccggattggacggcaaagtaactgtggaagaggccgacaacgagcggaatgccgaagttgtacatttgtttgatgcgtatcccctttatcaggtcgccctgcgtaaagccgagttttcttaaaattgtatagctcggtttttcatcttcactttcacccatttgtttaaaataaaggatacaacctgatgtaatcaggaacgttaaccctaagaagccgacgatgaacatcaccataccaaacagtgatttttgcgcagcgcttgtatctagtcttgataaatgctcgtttttcttgttcacctgttgaaaaagctcatttgctttttccatttgatcgtcatgtttcacattgacgccgataaatgtagattgcgccagctgaatgcgggggtctttatccttgtccagctgtttaaacaggctgtcatccacaatgacagcgggcatgcccccgcttgtaaacgtgtaggacacaagaaactcttctcttaatcctttatattttaatggctgcgtctcgtgcttgctttttactttaataacaccagagtccttgaaaaccattattttttgcagcaagtcggtgtatcctgagaaaacggcttctccagccgccacatcgactccttttacatctttgtcgctaacaacagcaagctgcatattgccgggatcgccctgcatctctttcggagttccatccataatatttgcaatgtcaacatttgcttgcaggacaggtgttgccttttttacaaacgagatgttgctttccctcaatttgttttcaaataacttggcatctttctcattcatgaatgaaaaatcagccgctacattttgttcagcggtcttttccgacgagtaatacgagatgtaagcaagagataacagcccgatggcgagcgctgaaacggttgtaataatcgtcagcagcagcgcattcgatttcattctgaacatgatcgaagacagtgacagaacctcagaaatatttaagtagccgcccttgctttttcgaatgatattcgagataaacgtaactgatcctttataaaacaaaaacgtcccgataatgacgctccccagaatgaagctcatcgcaacaaacagttcattaatggtcttaaattttccgccaaacagctcagaagacacatagtatcctgtcaaaatcaacacgatgcctaaagcgccgatcagcatttggaaaaatgatattttcttcactttgtcttcagtggaggacgttactttaaacaaagataaaatactctgttttttgataaacgtataattcatgatcatgatcaaaaggtaaatgccgcagaacacaatgaccgtttggaccaaggcctgctcagaaaaatgcagtttcgcatccgctttgacatcgacaattttgaacagaatcatcaagacaagcttcgatatcgaaaacccggccgctaccccgatcgctaatgaaccgaaatacagcatgacattttctgcacttaagatgcgaaaaattttatgcttcgtcattccaattaattgaaacagcccgatttctttactccgtctcttaataaaaatcgtattggcatataaaatgaagatcgccactacagccacaagcaaaatcgaagcggttttaatagccgcggctcccttgattgaagccttcacttcgttaattgctggatcatactgcagcgtgacaaaggcgaaataaagcgccacgctaaagatgagcgcaaacacatacaaatagtaattccggagattctttttcaaatttcgcaggatgagctgattaatgttcatgctgcaccccgcctaacacgccttgcgttttcataatatcctggaaaaacgtttgcctgtcctggccccctttattcagctgtgtatacatttgcccgtccttaataaaaatgactctgccgcagtagctggcagcgacgggatcatgggtaaccataataatcgtcgcgttgcgtttttgattgagctggctcagcttatttaatagatcggaggccgatttcgaatcgagcgcgccggtcggttcatcagcgaaaataatgctcgggtcatgaataaacgctcttccagcggatgttctctgcttctggccgccggaaatttcattcgggtatttatcccgcaattcatatattcccagttccttggcaacttcctcaaacttgcgattggcttccttttttgatagtttcgtgatcgataaaggcagaaggatattctctttcactgtcaatgtgtctaacaaattgtaatcctgaaagataaagcctaaatgctgttttctaaattcagccagctgcttttccttcatagccgtcatgtcatttccattaatatgaatggttccgtgactgacctgatcgattgaggacagaacgttgagcaaagtggtttttcccgacccggaagcacccataatactgacgaattcgcccttttcaatgtgaatatcgatgcccttcagcacttcctgtttattcagcttgtttccataactttttcgaattttattcgcttctaaaatcaccatttacgcagtctcctttatattggataatctcattataaaaaggaatgccgggcttttccttcgatacggcgaacaaaaaagaaaagcatgtgacattttcgtcacacgcttatgacatgttcaaattgattccgtattggaaaggttaatgtaaaaactgttcccgcaccaaactccgactcaacatcaatatggatcaataacggcgccgctgctttttttgccaagtacagccccatgccagttgacgcttgatcatggtgatccgttgtggatgtaaaccctttatcaaaaatacgcggtacatcttttggatcaatgcccctgccacaatctttcacttggagctgcgtctgttcccctttttgaaagcttttgatctcgatttcagaggcttcgctgtatttcaccgcgtttgtcagcagctgcctgatgataaacgccagccattttgcatcgctcagcacttctttggcctcgagctgtatgtcaaaaccgatccctttttggatacaccacgattgtaaatctttgatttctttaaagatcaaaggctgaagctgaatgaattctactgacaggtcgttttcaataaatgaaatgcgtttttgatgaagctgctgatcaagaagcaggtgaatacgcagccattcatatgacagctgggatttcagtgctttttcttccattctatcaatgattaaatgcatcgctgttaatggagttttgacctcatggatccatgccatcagctcatctttttcattttccaatgctaagcgatgccgtgctgcggtctgcttcaagtgttctgtttgcccggcaatgcttctttcaaccattgcttcaaacggcgtttccggttcatttatggctgtcacatcgagattgttctcccatgttttcaagcttttataaaacgctgtttctttccgatagcggaaccaaaggaatatgataaaaaacaagatgcacaaatacaccatataaagtacattcccaaatgatatggaaggatcgacaaaagcaatgaacagcatcaaagcctgctgaaacaaaaacgcggcaatccagctccgcctttcgataaggaatgctttaatcatagaacttgtcctcttccttcgcgatgtagccctggcccacctttgtctcgatatatgcaccaagctgcagggcgtccagtttttttcgcaggcgattgacattgacggtcagcgtattatcactaacaaaacgctcatcgttccacaagcttctgatcagctcttcccggctgacgatcttgtttttttgctctattaattgttttagaatgaacatttcatttttggtcagttcaacagatcctttgtcattgctgacgaggttctgctccgcgtctacagcagcgccgcaccacgttttaatcgtactcggctccgtattataatggtgcacacgccggaacatcgcttggattttcgcgatcagcacatcaaaatgaaatggcttttgaataaagtcatctgccccgagctgcatggacatcaccatatcagcaggatgatcccgggaggataaaaagagaatcggaacatttgaccgggagcggatcagacggcaccaatgaaagccgtcaaatttaggcagctgcacatcaataatgacacaatcaggattaaccgccgcaaattcctgcagcacctgactgaaatcctgaatgccgtatacatcataggaccatcccgttaaacgatccttgatttcatgaaacagcgattcatcatcttcaatcagcaaaagtttaaacaatcgactcaccgcactttttccttttttatcaagtgtatagcaaaacgccagcatgcgctatagaaaaagccggctgtctcagccggctcgttcgcattataattctcttctcaacgctgtcagcacgttggttttggtagcttttctcgccgggttcattccggaaatgactgcgacccctccgcaaatcacaacggcaatgatcacaaggctcgccgggatgtaggagaatgtgtaattcaaatcgcccgcatcgccaccgcttgtggccgcaagaatcatcggaacggccaggttgacaaggtagctcacgccgtaagaaatgataatcccaatcacacagcctaaaattccgatatacgcgctttccatcaagaacattcggcgaatgattgacgggctcgccccaatcgctttcataatgccgatctcttgcgttctctctgtcaccgccatcgtcatcgtgttaaaaatgccgatcgctgaaatgataactgcgatacatccgacaaagatcagtccgattttgaagaccatgaagaaggtattggctccctcaagttcagtagtcactgatgtgacatagtacccgtcatctgttagatcatttgtcagctgttccacattctcaaacttatcagcaaaaacaccaatgttcgtttcaacatttccgcctttgaaatctaagaattccgaaaaatcttttttgaattgatcactgataaaaatatttgagtcctccatccagtcttgagatggtttttttgtaataccgacaattttaaagtcatatgtttttgtttttgtaacatcccctgttttagaatctgtcttcgatacacttagttcaattgttttatttagaatatctttcgtatagccctttggttcttttatatcttctggatttccttttgcttcctcgatttttttgttatattcttccgattcttttttcgttaataatctctttgcgaagtcgtatcctactacgatttcattttccgactttgcgactcttcccttttccaattccatattggcctttaattcatcattcatattagtaaaaatgagatttgagctttcatttgtacgattgcctaaagtagctttgtttggttcatacacttgcgttctttctacaactgaccttacgtgatcatacttctctaaatcagcttttttaatcggcttgtctccttccttgcccattacgctgactttcgttacaatctgctggctcattgtcatatctgtaatcgtcttttgaatcccaaatccaacggacgacaacacaaccaaaaacgcacacgccattgttgtcgccagaatcgtcataaagacgcgaagcctgtttttcttcatatttcttctgataaaatgaacctgatccttaaacctcaacggtaattcctccttttagcacaccatcatgaagctgaaattttgaatgtccgatagaagcgacttcatcatcgtgagtaatgatcacaaatgtaatgccacgctcacgattcagctgctggatcaattccagcacttcatgttccgtttctgaatcaaggcttcccgtcggctcatccgctaagataatcgaaggatttaaaatcaatgctcgagcaatactgacacgctgctgctggccgcctgacagttcattcggataatgagcggcgtggttttccagaccgacgcgtttcagcatgtcctgcaccttttgcttccgctcagatggcttgattccttttaacgccagcggcatttccacattctcatacgtcgttaaacccgggatgagctgaaagctctgaaaaataaacccgaaatggtcaagccgaaattgcgcccattccttttcattaaaccccgtaacatcagtgccattaatgacaatccgcccttttgtcggcgatatgtagccggaaattaaattcaaaagcgttgatttccctgagccgcttcgtccgacaatgcaggcgatttcccctttcgccacgctcaatgaaacatccttcaatactggaacttcattctcacggcccttttttccgatcgtgaaagaatggtcgatatgctgaacatcaatcatatgttctctctcccttacaaaagtttcatttttttataaatcgcaaaataactaatcaagaaaccgattaccgcacctgtacccatgccaatgagataaccggcaaagctctcgcttgcagtaaatccaaaatagccgaagcccatgattcctatgataataacgatgatctgcaccgggcggttaagcggcttccataagaagaaatatccgtttctttcattagacattttaacaaagctaatatagccgatgatgtaaaaaatgatagtcatgatagccggaatgactaaataatatggtgaattctcagcccatttcgagtctacataaattatcggaatgaaatactgcacccatttaggtactggaccatggataaaatctattgatccgccaaaaaggatctcgaggttgatcacaggcaggctgatgagtaaaaacggcgaaatggccacggtaaatgagactagaagctgtgcgaaactattgcctgtcaaagctcctccggccataaccaaagaataagccagcatgctaacaataatcattcccaagctgtaattgtgaaaataaacggcctgatctggcttcaaaagcatgatcagcaaaacagacaaaacataacctatgagctgcggcaccacaatcaccattccgccggtaaggaacttcgcatgaaatatctgccctcgtgtatatggaaggcttaatgtaaaatcaaagaagctcttgctacgttcaatcccaagctggctgaccgccaaaacgactccccaaatccaaaacaatgagataaatgagctatttaaataatcaacgctgaatacgcaggggccgacccaattttcttttccagtgacacagccttgatagatgagatacatatttaaaattgataatggattacctaatataaaaaccaaaatggtgataactaaggcgactttattctgccgccactctttgtaaagcagtccggaatccggcaactcacttccctccaaacctaaggcatttcttacacttttgttttcttataaatagagaagtagctcacaaagaatccagccactgctccaatgatcatacccaaaatataaccaataatggaatgtccggtatagtatccaaataaaccaaatccaaggatgccgaaagccataaccagaatttgcaccgggcgatctaatctgttccataagaaaaagtgtccgttccgttcacttggaagcttcttgaagcttataaagccaatcaagtaaaatagcatgctcattacggctggaatcaataaaagatatttactgttaatcagccattcatttacaacgtaactaatcggtactaggttcgataaattgcttgccagagagaaataactctcaggggaagggaatatttcccatatattcgcaccaaaaacaacttctaggtttccaaccggcaatgcaataattaaatacggcaatatagctgctgaaaacgccgttaacagttgggcaaaagcatttccagttaacgctccggcggccatcaccagtgaaaaagccataaaacttatcacgattactccaatgctgctgtgctcaaaaaagtagacgtgttcagggttatagacaagaatcagcagccatgcaagtaaaaagccaatcaattgtgacagcacaatcacaaaaccgcctaaccaaaattttgtctgaaaaatttggcttctgttatacgggaggcttaatataaaatccatcgtgcctttcgaacgctccattccgaggaagcagaccgccaaaatgacacccggcacccagttgatatctatcagattgcttatggaataattcacaataaaatcacaatattgcgggtcttggcgatcaagacacccttgataagacaaatacgtattaacgatagaaagcggatttgccaatactaaaaacgcgatacttaacaaaatcaccacttgattctgcttccactctcgatagaggagacctcggtctaccatctccgcttccctccaaacttcgcaatgaacacttcttccaggttgacaggaagctcattccacacttttggcttcagctctctcaaaaagctctttttctcctcatcgcttttcggaatcagcactgtgtaaaacacgccggcctgatcgagcatcggaatgttttgctctctgatggccaaattgacatctgtatcgaaggccatttgaattttaatgtattcttcttttaactcatcaagatccatgacgttggtcaggctgttatcttcaagaaaaccaattcggttgcacatccgctctatgtcttcaagccggtgggacgtaatcaggatgctcgtatcacgctctgccacttcatcgaccatcagctgcagcacatcatgccttgtcaccgcatcaataccatccgtcggctcatcaaggaggatcagcgccggtctcgccgcaaacgacagaacgagcgatagctgcttttttaagcctgtcgacagctcacggtattttttcgtttccggaatttcgtatctgttcatcagctcattcgcgtacgtgacatcaaatttcggatatattcttctcaaaatatcgactaactgcttgtatgtatacttatcgtaaaacggattttgaacaggcatgtagatgatattttgtttgactttcgggtgctttttgatttctacgccgtcaaataaaatcgttccgctgtcagcgaaaatgatttgctggattaagcgaagcatcgtcgttttgcccgatccattgcgtccaagcaatccaaagatttctcctttttcgattgttaatgaaacatcttttaatacttgattgccgtcaatcgcttttgacagctgccgcagttcaatcattttttttgcctcccttcacatcagcgctgatttcctttatccattcgtgcagtttttccagctcaacccctgcatagtgtgcatcgatgatgagctgtttgagttgctctttaatcatcgtcatcttcccttcaaccagtgtcgtttttgcattctccgatatataggtccctctgccccgcagcgtttcaataatcccctctcgctcaagttctttatacgctttgctgacagtgttcggattcgcaataatgatcgttgccaattctctgacagaaggaagcttatcaccaggcttcatgatccctttcaaacaaagctctttcatttgctgaataatttgttcgtaaatgggtgttgagcttcttggatcgatttgaatcatttacttccctactttctatacgatctgaaccttttatagataaaaatgatcaattatacttttttgccattcaaaaccgatcatcacaagaacaagaaaaaaagaacaagcgatcacagatgccgcaatcagcattggcacgttacgtttgtttcgttttttatgtttcataactgcctcccttaatgtcaatatataaatgattttatattagtgtctatagtgtattacttcaattagtacacttaatacaataaatactttgactcacaaagtcaatcctttttttacaaaaaaacggacccttttaaaagggtccgttttcctacacatcaagagggtgctgcaggatcatattattttgcaaagattgaagctgaagtctcattctgtacagctgttctctctgctgatcatttgacgacagccatagtttattcaaggcatttaccgcatcttctagctgcatttgtgcatcactatattcttgatcgttataatgctcttgtttagaagcgattttcagctgttcttcagcataatcataggcctgcatacattgctggagatgttcatctactgattgtcttgttgccacagtaacccctcctcttggtaatggaaatcatccatcattcatattgtagcctcatctgactttattcaataaagtaatttatggtcgatattcatttgttctcttgtgaaatgcgtgctacaattttaggatgcaatcgtacgcaaggaggcacatgaattgtgatgcagaacaatccttttccttattcaaatacggaaaaacgctatcatacattgaattatcatctcagagaacatttcggccataaggtgtttaaagtagcgcttgacggcggttttgactgtccaaatcgggatggcaccgtagcccacggaggctgtacgttttgcagcgcagcaggctccggagattttgctggaaaccggaccgatgatttaattacgcaattccatgacatcaaaaaccgcatgcacgaaaaatggaaggacggcaagtacatcgcttattttcaggctttcacaaacactcacgccccggttgaggtgcttcgtgagaaattcgaatccgtcctcgccttagatgatgtggtcggcatttcgatcgccacacgcccggactgtctgcctgatgatgtcgttgattacttggcagagctgaatgaacgtacgtatttgtgggtggagcttgggcttcaaacagttcatgaacggactgcacttttgatcaaccgcgcacatgattttaactgctatgtggaaggcgtcaataaattaagaaaacacggcatacgtgtctgctcgcatattatcaacgggctgcctttggaagaccgggacatgatgatggaaacggcaaaggccgtcgcagatttggatgtccagggcattaaaatccatctgcttcacctactgaaaggcacgccgatggtcaaacaatatgaaaagggcaagctggaatttctttctcaagatgattatgtgcagctcgtctgcgatcagcttgagatcattccgcctgaaatgatcgtccaccgcattacaggtgacggaccgattgagttgatgatcgggccaatgtggagcgtcaacaaatgggaagtgcttggcgccattaataaagagctagaaaatcgaggcagctatcaaggaaagttctttcaacggcttgaggaggaatcagcgctatgattttgaagaaaattcttccttacagcaaagaactgctgaaaatggccgcgggagagggagatattgtcgtagatgcgacaatgggcaacggacatgatacacagtttttagcggagcttgtcggtgaaaacggccatgtatacgcattcgacatccaagaatcagccgtggccaatacaaaggaacggctcggtgacatgtatcaagcgcgaacaacgttatttcacaaaagccatgataaaatcgctgaatccctcccgcctgaaacacatggcaaagtggcggccgcggtatttaacctcggctatttgccgggcggggacaaatcaattacgacaaacggcagttctacgatcaaagccattgaacagcttctcagcatcatgaaagacgaaggtctgattgttctcgtcgtctatcatggccacccggaaggcaaagctgaaaaaaacgacgtgctcgagttttgccgggacttggaccagcaaacagcccgtgtattaacatacgggtttatcaatcagcaaaatgacccgccatttattgtcgccatcgaaaaaaaagctcagatcagcaaatgatttgagcttttttctttgaatttttcatccaggacattttttgaaatttccggtaggctctgccgttgatataaaagaaaagggaggtttttccgctggctttgatcagcttctttgcgagccggcccatttccttttggcctgccactttatcatctgacaaataaacgccaagcaagccgcgattgattaaacgatggaagttttcatgcggaatgccttgtaaatgctcgtcggctttatggataaagtgttcaagccggtccatcatctcttcatgagactgataatacgagcagaaattcaagtctccttccagcaagtcctcctcttgatcaatcaaataatcaagaagaatatgaagaccctgtatgtaaggaaaataactgtctcggatttttttagcggtgctttctgtgaaatcaggctggaacgaatacgcaaccagacagaaaatgcctaacgttgagcctgcacaggctgaaaattcataccattccatctcaggcagctctgattcatattgagtaaaccacttttcaagccgcggaacacgctcatgctcaataacgtgcttatgcacctgcaaatcgcaataatagccgcacagttcaagcagataaggtttaatcatgtcatagtgctcaatggagccgagaacacgctggcacgttttaaccagttcatgcaaatatccgctgtcatcctgttcttccctgaattgataatagttttgcagttccgccccaactgtcagtgcgtcctgcattgaggcatggagcatccgaaaatcctgcgggtccagcgaggtgctgcggtcacacagattgtccaaataatcactaatcgtttgatacgcgatgataaactcgacacatttctgcttttggctgcctgacaataaggccagtatgccgccgccttcacagtgaaacgttttgtcccgaatacttgcggttgcctgtgctttcaattcactgttatgaatcgattctgatttttgcttccatatgtccagctcttgatgaacgagcggaaaaatatctcgatatacctttgccatcaatccaaaaggatgttccggtactgtcaacacatgcaccccctactagttcaaatatattgatcagtaaacgctcttgctgctttaaaaacatcttctctctcgggttcattgaagatctcatggtaaagcccttcccactctctgtatgctttattatgagaagcaacaccattaaaccacttgatgaccatcgttttgtcaacaagcttgtcatcaccggcttgcatcacaagaagcggaactttcaaaaatgcctctgtcggcaccattgccgattcaattgtctttaaaagctctctgtaccatctgacagaaactttcctgacgtataacgaatcattttggtcagcttcgatgacgtcctcattgcgcgtcgccatatcaattgataatcccgaatcaaccttaagtgacggagcgatgacattcaggccttttgatgcaagatcaagcgctttattcactttaatttgcagtccgagacacggtgatgataaaataattcccgtaatccggggatttctttgctgtttaacccattcaatcgcgaccagaccgcccatgctgtgacctagaagaaaaaccggaagatcaaaggttcgcgctttatctatccaagcatctacttcatcaatgtattcttgaaacgagcgaatatgccctctcgctcttgtcgttgttccctgtccaggcaaatcgcccatgacaacgtgataacccgaagaccgccacatttcaatcagccatttatatcgtccgtgatattcacttgccccgtgaatgattacaatcacggcaacaggtctgtctgctttccaggtccacatgatcttcacctcatacgaaatttaaatagagaaagaaggatgaatcttatgatctacccttataaggaacacaagccagatatccacccaacagcctttatagctgataatgcaacaattaccggtgatgtcgtgatcggagaacagtccagcatttggttttctgttgtcataaggggagatgttgcgccgaccagaatcggaaacagagtcaatatccaagatttaagctgcctccatcaaagcccgaacaagacgctactcattgaagatgacgccacgataggccatcaggttacacttcatagcgctgttatccgcaagaacgccttaatcgggatgggctcaatcattttagacggagccgaaattggcgaaggcgcttttattggtgccggcagtcttgtcccgcccggaaaaatcattccgcctggccatctcgcctttggccgccctgcaaaagtcatccgccctttgacggaagaagaccgaaaagatatgcaaagaatacggtcagaatatgtagaaaagggccaatattataaatttcttcaacaaacataagacctgcttcgtcttactttaccatttttcaaattatatttgaaagcaataaccatcgttaacccggacgtcatacagttcgggtttcgatttttccataaaacgttcacatatagcatgaaacgtatgacttttatcttatcacaaaactataaacagcctctgcaaaaacacatacctattctttcctgttctctattttctatgagcacacacaaaaagagcccactgggagctctttttgtcagctgatatttcgttcgctggcagcagccgcattttttttatgaaacccttttccatagtacacagccagcaagatgagaaaccatatcggcccgataatcacggctactcttgtatcagggctgtaagccataagaatgacgacgaatgctagaaatgccaatgacacataagacgtaaacggaaataaaggcattttgtactttaattgtttcttttcttccggcttcaaacttttcctgtattttatttgagaaagcaaaatgattgcccacgtccaaatcgctccgaacgtcgcaatacttgtaacccaagtaaataccttcgcagggacaacatagtttaacagcactccgactaataaagcgcccgctgaagccagaacagctttacccgggatgccgcctttcgtcagctgaccatatgcttgtggcgcctctttctgttccgccaagttaaacagcatccgccctgtgctgaaaataccactgttgcatgaagacagcgcggctgtcaacacgacaaagttaatgatacctgcggccgatggaatgcccactttttgaaatgtgagaacaaatggacttccttgagagccaatttcctgccacggataaatagacataatgacaaataaagcgcctacataaaaaatcaaaatccgccaaaatactgtatcgattgctttggctaacgatttttgcgggttttttacttcgccagccgtcaccccgatcatttcaatccctaaataggcgaacatgaccatttgaagagacaataaaaccccttttaatccatgagggaaaaatcctccgttgttccacaaattgctgattccggttgcaatgcccccattgccgactcctgcaataatcatcaataaaccgacagcaatcatggataagattgcaacaattttaatcaatgcgaaccaaaattccagctcgccgtaagctttgacagccaggaaattaacacccgtcataatgaccagtgccgataacgcccaaatccagtttggcacgtccggaaaccagaaccccatatagatgccgacagcagtgatttcggccatacaggtgacaacccataaaaaccagtagttccaacctgttaaatagcctgcaagcggtcccaaataatcacgcgcatacctgctgaaggagcctgcgaccggtttttgaatggccatttccccaagcgctctcataataaaaaacatgaccaggccgcttgcggcatacgctaccaaaataccaggccctgctaattgaatagctgatgcggagccgaggaacaaccctactcctatagcagctcctaaagacattaaagaaatatgcctttcttcgagtccgcggtgcagctcttgtttttgtttttgcatgcttcttctcccctagaaaaaaatatcattatatcatttttctgaatattccgtacggattgggtaaatcaatgatgatggagaaataaaaggataacaacaaggctttcgactactcgaaagccttgttgtctgttacacaaagatgacttctttaggctgatggctcagctcttcaggcatataccgtttttcaatattgatgctgtgccagatcataaagattagcacagtccaaattttacggctgttatcagccttgtccgcacaatggtcttcaagaagctgaaggacataatccttatggatataagcatccgtttggctttcttgaataatattccgcacccattcgttcatttcgtttttcagccaatgacggatcggtacagggaaaccaagctttttgcggtttaatacgtgctcaggcacaattccttcagcggctttgcgaagaagatacttcgtcgtgccgttcttcgttttcagctcatcaggaatttttgaagcgacgtcgaatacgactttatccaagaacggcacacgcagttccaaagaattcgccatcgtcattttatccgcctttaacaaaatgtcgccgcgcatccaagtgtggatatcgacatactgcattttgttgatatcgctgtacgagctgctttctgtaaagtaagtcttcgtcacatcgcgatatgaaaggttcggattataatgcttcaacagctgctttttgacagactcttcaaagattttcgcgttaccgatataacgatcctgaagcggagtgcagccgcgctcaagcaggctcttccctctcataccttcaggcataacggcagcaacgtgcagaagcatctttttcaagccggacggaatccgttcaaacggtttaagcgaaagcggttcacggtaaatgttatatccgccgaagagctcatccgctccttcacctgataaagcaaccgtaacatgtttttttgcttcttttgcaacaaagtacaacggaatcgctgccggatcagcaagcgggtcatcaaaatgccatacgatcttcggaagctcattcatgtattcctcaggcgaaatgactttgctgatattttcaatgcccagcgccgctgccgtttctttcgctacatcaacctcactgaagccctgctgttcaaagccgacagagaatgtttttaagcttggatgaaattccttcgcaacagacacaataaaggaagaatcaatcccgccagacaggaacgaaccgacaggaacgtcacttctcatatgaacgtttacagagtcatagatcgcgtctcggacttctttcacaagcttgtcttcttcagtctgaaccggcttgaagttcgctttgaaatacgttttgaatgtgatatcgccgtccgggcggattgtgaattgtgaacccggctctacttttttcacatgggcatcaagcgtgcttggttcaggaacaaattggaaagacatgtactgctgcaatgcctctttatctatttcaatatcattctgagcaaccattaaactttttctctctgaggcaaaataaacctgatcattgatcgttgtgtagtacaacggtttaatgccgaatggatctcttgccccataaagcacatgatcgtttttattccaaatcagaaaggcaaacataccgcgcagtttggacgccgcttcttctttatagtgacggtaagtcgcaagaagaacctctgtgtccgaatccgtgttgaatgtgtacccctttgcttcaagttcttctctcagttcgatatagttatagatttctccgttaaagataatccaatatgtttcatcttcatatgataaaggctgtccaccattttctacatcaataatgctgagccgtctgaatccgaagccgacgtgctcatcatggaaatatccatcactgtcaggaccgcggtgaacgatcatttggttcatttgtttgattagttcttcttgatcagcggtttgagctaacggatgcttgttaaaaaccccgacaaatccacacatagtattgcctccataattaaaattgtcatcattgaacccctatttatagacgctgtgaatagtatttggtttcacagttatgtaaaaaaataaacatgaatacaacgataaaaaagggaaagccgcttaaccagtaagcggctataaaattattctcctaacgcttctttacgcagctgctccgctttgtctgtgcgctcccatggaaggtcaacatcgtgacgtccaaagtggccgtacgcagcagtttgtttatagatcggacggcgcaaatcaagcattttgataatgccggcaggtcgtaaatcaaagttattgcgaacaacttcaatcagtttttcctcagaagcttttcctgaaccgaatgtgttgattgagattgacacaggctgtgcaacaccgatcgcgtaagcaagctgtacttcgcaagaatcagcaagctcagccgcaacgatgtttttcgcaacgtatcttgccgcataagctgcagaacggtctaccttcgtcgcgtccttacctgagaacgcgcctccgccgtggcgtgcatagccgccgtacgtatcaacgatgattttgcgtcctgtaagtcccgcatccccttgagggcctccgattacgaaacgtcctgtagggttgatgaaatattttgtttcttcatcaatcagctcttcaggaacaaccggattgattacatgttctttaatgttgcgctgaatttgctcaagtgtaatttcagggtgatgctgagttgaaataacaatcgcgtcaatgcggactggtttgttattttcatcgtactcaaccgttacctgtgttttgccgtcagggcgaaggtacggaagaatatcttctttacggacttcacttaggcggcgggctaatttatgggcaagtgaaattggaagaggcataagctctttcgtttcgttgcacgcataaccgaacattaatccttggtcacccgcaccaatcgcttcaatttcttcgtcgctcattgtgccttcacgggcttcaagcgcttggtctacgcccatcgcgatatcagcagactgctcatcaattgatgttaaaaccgcacaagtttccgcatcaaatccgtattttgcacgtgtgtatccgatttctttaatggtttggcgaaccgttttcggaatgtcaacatacgtagaagttgtgatctctccgcttacaagaaccaaacctgttgtcacagatgtttcacaagcaacacgcgcgttagggtctttctttaaaatttcatctaaaatgctgtcagaaatctggtcacagattttatccggatgcccctccgtaacagattctgatgtaaataaacgacgatttttactcatgatttgcttcctcctgcacaaggcctcccgaaagaccttgtatatatgatacggaactcgctccctcttatacaatgtacagttatattagagaatgttaattggcatatttatgaaataaaaaaaccttttccatcgaggaaagggtttggtctttgtgcctttcactcttatcgctcaaggaatcatacaaccttgcaacaggttagcaccttggttgtctcactcagttgaacataataaataacagagaaaccggttgctgggcttcatagggcctgtccctccgccagctcgggataagagtatccgctcaatgaaatatcttatcgtaaaagggtttgcaatgtcaatatgattcagaagaaataggcacctatattgagggaaaacaatggaaatgcacacacaaaaaacaataaatagtatagactatttgaaaatatatgttatactaattcacaattagcaaaacacaaaaaacgataaaggaaggtttcatatgaactcagttgatttgaccgctgatttacaagccttattaacatgtccaaatgtgcgtcataatttatcagcagcacagctaacagaaaaagtcctctcccgaaacgaaggcattttaacatccacaggtgctgttcgcgcgacaacaggcgcttacacaggacgctcacctaaagataaattcatcgtggaggaagaaagcacgaaaaataagatcgattggggcccggtgaatcagccgatttcagaagaagcgtttgagcggctgtacacgaaagttgtcagctatttaaaggagcgagatgaactgtttgttttcgaaggatttgccggagcagacgagaaatacaggctgccgatcactgtcgtaaatgagttcgcatggcacaatttatttgcgcggcagctgtttatccgtccggaaggaaatgataagaaaacagttgagcagccgttcaccattctttctgctccgcatttcaaagcggatccaaaaacagacggcactcattccgaaacgtttattattgtctctttcgaaaagcggacaattttaatcggcggaactgagtatgccggtgaaatgaagaagtccattttctccattatgaatttcctgctgcctgaaagagatattttatctatgcactgctccgccaatgtcggtgaaaaaggcgatgtcgcccttttcttcggactgtcaggaacaggaaagaccaccctgtcggcagatgctgaccgcaagctgatcggtgacgatgaacatggctggtctgatacaggcgtctttaatattgaaggcggatgctacgctaagtgtattcatttaagcgaggaaaaggagccgcaaatctttaacgcgatccgcttcgggtctgttctcgaaaatgtcgttgtggatgaagatacacgcgaagccaattatgatgattccttctatactgaaaacacgcgggcagcttacccgattcatatgattaataacatcgtgactccaagcatggccggccatccgtcagccattgtatttttgacggctgatgccttcggagtcctgccgccgatcagcaaactaacgaaggagcaggcgatgtaccattttttgagcggttacacgagtaagcttgccggaaccgaacgtggtgtcacgtctcctgaaacgacgttttctacatgcttcggctcaccgttcctgccgcttcctgctcacgtctatgctgaaatgctcggcaaaaagatcgatgaacacggcgcagacgttttcttagtcaataccggatggaccgggggcggctacggcacaggcgaacgaatgaagctttcttacactagagcaatggtcaaagcagcgattgaaggcaaattagaggatgctgaaatgataactgacgatattttcggcctgcacattccggcccatgttcctggcgttcctgatcatatccttcagcctgaaaacacgtggaccaacaaggaagaatacaaagaaaaagcagtctaccttgcaaatgaattcaaagagaactttaaaaagttcgcacataccgatgccatcgcccaggcaggcggccctctcgtataaaaaacaaaagccaagagcaattatgctcttggcttgttttaattgacggaatgcaaagaagtcagcttgtatgtaatgatggtccggccttcttcccattgaagcttctgcacttcagctgtgcctgacttttcgccaaactttgttttgcgtacatccattggaatctccatcggatatactcggtatccgtccttctctaacgtgaatatattttcatctatgcgaacttcttttccttttgtcacaatcagtgtattaaattcaacaggcattcccaaagtgaaatcccctttcgttctcttttttctttatcataacatatttcactgtcagcggtttttcatccattgtgtgagctgccgcacgatacgccggttttcttttggcgggaaataatgtgtgaatgtactgtagtaccatgtttccaccggcttatgcagttgttttagcttctcttctaataaataggaatgctgaatcgaaacattttggtctttttctccatggattaacagcacgggagcctgaattttgtttacttggtcaaacggtgtcctccattgatattcctcaggcacctttttcggtgttccgccgatgactcttttcatcattcgccgcaaatcctgccgctcctcgtatgtaagaatcatatcactgacgcctccccaggaaacaaatgaagctgcctgcccgcccatttcgatcgcagtgagcattcccataattccgccgcgggaaaaaccgaagatatggattctatccttcttgacatttgggtgctgctgaagcaggcgaaaagcagaaaatgcatcctccctgtcttctccggcaaaatcctcattgccttctcctccttgattgcctctgtaaaaaggagcaaacaccacaaacccttgggatgcaaactggataatccggcccggccgaaccatgcccacgcttttaatcccgccgcgcaaatataaaaatccgtcatattgtcccggttccgccggctcagccagaagccccttaacccgtaatccatttgacagatagcagatcgtatacaaacgcacatgctggcttggcgacggaaatcttcttttctctacaatcaaaacagccgcctccttttttctatatgctttccttactccaaaattacatccggagaacctggttaggcattcacacatttttatacccatcatacgatatgtaaagcaaaaaaggatattaacttgatgcgaaataaggaggttgtctatgtgaacagatggttaaggctgggcttcgcctgtgtcggcagtatctttctgatgttcgccctggcggcttgcaagcaggaagaaacgctcaccaaagtcaaagtagctgaagtgacccattcaattttttacgcacctttatatgttgctgagtctaaaggtttttttaaggaagaagggcttgatgtcgatgtgaatacgacctggggcggagataaaacgatgacatcgcttctttccaacggctccgacatcgcgcttgtcgggtcagaaacatctatttatgtcgaagcgcaaggggctaaagatcccgtcattaatttcgcccagctgactcagacagacggaacgtttcttgtcgcgagagaagatgttgaacacttcgactgggatcagctgaaaggaaaaacgtttctcggtcagcgaaaaggcggcatgccgcaaatggtcggcgagtatgtactgaacaaacataagattgacccgcataaggatatagacctcatccagaacatagacttcgccaatattgccaatgcgtttgcttctggaaccggtgagtatgtacagctctttgaaccgcaggcttctctctttgagaaaaaaggcatcggccatatcgtggcttcattcggagaagaatcaggagaggttccttatacgacttttatggcgaaacaaagctatttgaagaaaaatgaagacacagccgtcaagtttacaaaagccatttataaggcgcagcagtgggttgaaaatcattctgcgaaggacatcacagatgccattaaagatgaatttgatgataccgacccagacgtcatcgaaacatccattgaacgctataaaaaacagcattcatattcaccagaccctctgcttaacgaaaaagaatgggagcttctccaaaccattatggataaatcgggagaactgccgaagcacattccatacaatcagcttgtaaataaagaaattgctgaaaaagtcacctcggagaaataggaggcgccatctatgtctttcttacatgtcgaccatgtaacccatacttatttttctattaaagaaaaaacaacggctgtgcgggatattcatttcgatgccgaaaaaggcgatttcatctcatttctcggcccaagcggctgcggaaaaacaacattgctttccattattgccggtttgattgagccatcagaaggcagagttctgattgaaggccgtgagccgaatcaaaaagaacataatattggctatatgcttcagcaggattacttatttccctggaaatctatcgaggaaaatgtgcttctcggtttaaaaatcgccgacacgctgacagaagaaagcaaagccgctgcactcggtctattgccggagttcggcctcatagatgtggagaaaaaatatccgaaagaactgtcaggcgggatgcgccagcgggctgcgcttgcaagaacacttgcgcctaaccctagtctgcttttgctggatgagccattttccgcgcttgattttcagacaaagctgtctttggaaaacctggtattccgcacattaaaggaatatcaaaaaacagcagtgcttgtcactcatgatataggggaagcgatagcgatgagcgatacgatctttttattttcaaatcagccgggcaccatccatcagatttttaccattcctaaggaattggccgcgatgttgccttttgacgcccgtcaggaaccttccttccagacactgtttcaaacgatatggaaggagctgaattctcttgagaaacagcaaagaaaccattgatctgcttcacgagcagtatcaattcaaacagaaaaaggaaaagtggaaggtccattcctttcagcttgccatatttattctctttttctcgggctgggaaatctccagcaggcagggctggatcgatccgctgatcttcagctctccatcagctgtgtggcgattattgctggagaaacttggtgacggttctttactgtcacacatcggcgtcactttatttgaaacggtgcttggctttttgctcgggacgtttatgggcacgtgcctagccgctttgttatggtggtctaaccgacttgccagaattttagatccgtatcttgtgattttgaacgcaatgccgaaagtggccctgggcccgatcctgattgtcgcgctcggtcccagttttatcagcatcattgcgatgggagccatcatcagcgtcattatcacaaccatcgttgtctacaccgccttccaagaggtcgacgaaaactatacgaaagtcatgaaaacattcggcgcaaaaaagtgggttatttttaaagaagtcatactgcctgcatcctcccccgcgattatttcaacactaaaagtgaacgtcggtttatcatgggttggcgttattgtaggggaattcctcgtttcgaaggtcggattaggatatatgattatttacggattccaagtcttcaattttacactcgtcttcttaagcctgctgatcatcgccatcttcgccactctgatgtatcagggcgtcgagctgctggaaaagaaatggacgaaggggaggacataaaaaacccggcacatgtgccgggttttttattcaatccatccagattctttcagttttttcaagctgatcggaagaacggaatccttcataataaagctgaattttttattgcgggaaaggttctccggcagctcgtgaaacaaaaccgggcctttcgtttcaaagtaatcagcctgcttttcaagcttttctatatctgcaaaatatatattttttacaatcactttttcttttccgagaactttatactgtccgagatacttgaggcttttgactctcgcgcccgtctcttcctttacttcccggagcgcagcctcttctgcgcactccatcggctctactttcccgcctggaaactcatagcctctgtcctcatgttctgttaaaagccatttgccgccaaaacggcaaatcacccagacatgcttcgggctgtccgagaaaggctgatcgtcaaaggaaagctgaacagtattctgataataatctttaaactcgtacatgtttatccctcaaatccgttcctagctatcttccatacatcataccacagttacgtttcttcggaagccttttatcaaaaaataagggaaacccagcacgccgtcaggttctgcatgcagactagctcgtacagtttttttgcgatacttttgccggaaagtgcgaccgacgctctgggctttattatgacccgcgaacagggaaaagttacggtttgcgcttaaatttattttttaacgtttctaaaagatcgacaagcatctgaggaaccggtatgccaagagagctggctgtcacaacaatttgcacagattcataaagaatataaaacataatagccaagtcacgaattgatccctgtgtattcagcagctgatcaaaaaagtggcatacagagatcagagccagcgtgactaattttttgacaagccgggcaaatacctttttaaatgacagtttgtgaataatggtttccttcaaagtcgtactgataaattcaattgccataagagagagcaaaatcagaaatgaatactgaaaacctccaaagaaaaaacccgctgctgaaacgctgactgctaaaaacgaaaagatgccaaagtctctatccatttatcccaacatcctttcacagaaacggccttacgatattctatggtaaacaagccgaacggattggatttttcagaaaaatggactggttgtcgcctatttttcagatacaaaaagaaaagccggacgtcttttttaagacatccggccgttctatttttgaacttaacctaggtaagcttttagcatccagttatgtttttcaatattttgatggatcgcaagaagcatgtcccctgttgtttcgtcaccgacttcatcagctaaatccatgccgtttttcagctcttccgcgatgactgtgaaatcatcatatacgctttgaaccatttgttcagctgtttcatttccagcagcttctttgacagaagccgtttctaaggattccttcattgttgcaatcggttttccgttcagcgccaaaagacgttctgctaagtcatcaatataagttgctgtttcgttgtacagctcctcaaacttttcatgaagagtgaagaaatctttccctttcacataccagtgataattatgtagtttcacatacatgaccgtccagttggctacttgtttgttcactgcttgaatcaattgttctgacatggtatctcctccttgttatatgactatgtatacccttaatatcgtacgctaaaacctcttttttacccttatctgtcacgatttcttctattatgctacaattgttaaaaaacgggaggtggaatgtcatgacgcttctcattacgataagtattttgattgtgctggctgttttgcttgtaaccatttggacgactgtaaaagcctataatgtaaagcataccattgatccaccacaagaaaatcactctgattcacacaatcaatgatgatgtgaatgctcctcttctgactgattgctggcagcatcggcgtctccgacttggacttttaaggtcggcatgctatgctgtttttttgctgtgacatgagattggacagtgtatacaccatcttccttaaacgtcgtttccaatcggtatacgcctttttcttgtttcaccttaaacatttggcttgcgtctttttccccttctttccatacttcaaactctacttcatcggcatccgtcacagcttcatcaccatatgatacagctgcttcataagcagcgctttctccgggatttactttttcaggcccggtcagcttgacatccaaaacctcgggcgtctcagctgtatttgctttactttcaccagatccgcatccattaagcaataaagcagaaaaaagcagaacaaccaacatctttttcatgccatcaccctttcatcgtttacctaaatagtagcaaacgcttacagcaaatggtacacaaaatatgagacgtcacaaaaaagacctttttgcttaagcgcaaaaaggtcctttctattttagccaaatacttttagcaattcttctttatcctgtgaaagccagaaacgcattaaacgtttagcgccttccagatcatgaagcttcgcttggccgcactgcttttcattcgcagcaggtatttctgtaatctctaccgcttccttcattgtgtcttcaagcagatcaacgatttccgctgatgtcggctctccgctcacaactagataatagcctgtctggcagcccattggagaaatatcaatgatatcaaaatgatcgtatttctcagcgtgagaacgaatcgtaaacgcgagcaaatgctcgagtgtgtgaatggtgtcaggcttcatcgcctgtttatttggctggcaaaaacgaatgtcaaatttatttacaacgccgtctgttcccactttatgcacgccgcaatgtcttacatatggagcaacaaccgcattatgatcaagctcaaaactttctactgaaggcataatggcactctccccttttttaaaaatgtaatttcattataacatacttttccgataagaattattgattaacttttcaatctgtgttttttttcttatacttgcatcagaaaggttgctgaagaaacatgaaaaccctattcatcgctctgatcagaggatatcaaaaattcatctcgcccctgacaccgccaacgtgccgcttttatccgacctgttcccaatatggaatcgaagcgattaaaacacatggcgctttaaaaggcggatggctgacaatcaaacggattttgaaatgccacccgttccatccgggaggagtcgatcccgttcctgaaaagaaacaaaaacattaattgttataaccgtttacgataagatccagttttccggttttaggatcaatgactaagccatggaccggaacgttttcagggaacagcgggtgatgtttaataacatctacgctgtctttcacactcgcttccactgaatcaaagcttttaaaccattgatcaaagtctacaccggagtactttattgtttcgatgcgttcttccggaatccctcttgctttgattttttcaagcatgcttttgctgctgattttgctcatgccgcaatcgtgatgcccgatcacacacacctcatctgcattcagctcgtacactgcgacgagtatacttctcatgatgcttccgaatgggtgtgtcacaagcgcaccggcacttttaatgattttcacatcaccgtttcgcaaattcatcgcatgcggcagcagttcaaccagacgagtatccatgcaagaaagaatcgccatttttttatctggaaattttgatgtttgatacttttcatactctctttgttcagtaaatgtcttgttaaattcgagaatatcatttagaagactcatgttcgttgtccctttctattctttttactcttcaatatatcacaacccttgtttattcgtcataataaaaaaagacaaaccctcaggcctgccttatttccccatgttatagcgttttttgaactgctcaactcgtccgcctttttcattgaatttctggcggcctgtataaaacggatgcgtgtcagagcttacctctactttaatgacaggatatgtgtttccgtcctcccactctgctgtttcattagatgttttcgtagaggtgcttagaaaacggtagccgctgttgacatcctgaaatatcactttgtggttctttggatgaattccttctttcatgggtatctcctttcaataaatcgtaataattacgttttattttataaccttacaaacgttttgtcaatcttcttatatccttccctctgtttcacatcgtaaacctcatggcatttaagaataggaagaataatctaaccgaggaagcaaataataaacccaaaatacatacagaacgtctttttggaaaggtggtttacgattgtggatgatttagttttggccagaagcctttttggcacgacgatgggctttcatatcattttcgcaacacttggagtcggtctgccgctcatgattttagtggcggaattgatctatcaaaaaacgaaagatgaccattatgcgatcatggcgaaaagatggacgaaagcacaagccgttttgctgggggtcgccataccgaccggaacgatcgcgggcactcagctcgcgcttttatggccgggatttatggaagtcatcggccgggtgatgtccctgccatttcaaattgaaatctatgctttttttgttgaagccctattcatgtcgatttatgtatacgctgcagaccgtttgtcacctgcaatgaggattgttgctgttttctttgtgttagtcggggcagcagcatccgctgttctgatcacgaatgttcacgcttttgaaggtacgcccgccggttttaaaattttaaacggaaaaattacagatgttgacccgtgggctgcgttttttaatcctagcttttttatcactgccggccatgtcgtgctgtccgcgtttatgactggtgcgtttatcgtggcttctgttgcggcgtataaaatgatccgaacgaggaaaaaggaaagggtctatcgctttcaccggaaagcccttttgctcgcactgacgatcggcggtattttttcattgctgaccgctttgaacggacacgaatctgcacagatgctgtacgaataccagcccgaaaaattagccggtgcggaaggcctatttgaaacaagatcccacgccccgctcgctatcggcggttttaccgacccgaatgaagaaaaagtaaaatgggcaatcgagattccatgggctttaagctttttggcagcgaaccgttttgacactgttgtaaaaggattaaatgcatttccgagagatgaatggccgccgcttttcattcacacgctgtttaatgcgatggttggtgtaggcatgctgctaattctttattccattatcggtgtggtctggagaaaggtgctcaagaaagaccgtttcccaacgtggcttttgatcattttcatgacagcaggcccttttagtctcatcggcattgaattcggctggattttcgcatgtacggggaggcagccttgggtcatctatcatctgctgaaaacgtcagatgtcgtaacaacgactggctcgatcggggtgctgttcttatttttcacatttgtttatgccgtgttaggcgcagctgtcgtctacgtgctgctgtattatttccgcaagcacccggttgacgaagatttaaatacagcggagtcgtaatggctccgcaaacaggaaaccaaatggaaggaagatcgtacaaatggagatttcaactgacgctctgatcgccatctcaattatctggggctttgtgtttatttacgccgtcatggcgacaatggattttggagcgggattttggtctatgatctatttaaacaaggagcatatgaaggccaccgatattgcgaatcgctttttgtccccgacttgggaggtcacaaacgtctttattgtggccatcgtcgtggcgcttttcagttttttccccggcgcgacatttgtgctcggcaccgttttattaattcccggaagcatgattttgctgcttttagcaattcgaagcggatttctcgtgttttcaaatacagcaaaggagcggaaaacgctaagatatatttccggcatctccggctttatcattcctgctattttaattttggtgcttcctgtgacacacggagggtttatagaaaaaacggatggaatctataacttaaatatgtctaaaatcttttcaagccccaacgcctattcatttatcgggtttgcgattttaagcaccttatttttgtcctcgctgttgcttgcagatttttcaaatgtggcagaggaacaggatgcgtaccgagcctacagaaaaagcgccctgattaccggcccgatttcactgttgtttgctgtatgcattatggtaactatgcggaatgaagcaaactggctgtacagcggaatgatgaatgatttttcttggattattgcatcgttcattacatttgtcattgctggaatcgctctttttctgcctaacaaaagctttggtcaaaacatcggaaaaccgcgtctcgcacttgttgcgattgggatacagtattttctcgcaagctacgcgtacgggcgggcgcatcttccgtatatgatttatcccgatgtgacagtcatgtcaggcttcacagagccagcaacgttcagagcgctgtttgcaacgtatatcgttgcatttatcattctatttccgggcttctttttcttctggaaaatgtttatgcgagataaacgctatatccgccaggaggaatagagggcaagccagccggctatactaatccagaacctttataaggaggggatggcatggagcagaaaattctatgtgaggtcaacaactgttcttattggggcaaaggtaacaaatgcaccgctgatgccatttatgttgtcagccatactggtgaaacggctgaaaacagccgggaaacagactgcaaaacgtttaagccgcatgatttataattaaaagaaagagctgcatcagccagctctttctttttgcatgttgagtgttctcagctttttagttatgaccccgtttgcaggtgaaaacaaaaaggcgcttgcataacatacacctgtcatggccgccatcgctcctgaaatcgaaacattaagccacgttgcgaagaaatagcccatgaccgccgacagcccgccaatcaacgcgctgagaatcagcatataaagaagccggtctgtcagcaaatgtgccgcagccggcggaacaatcagcatggccacaaccaatacggcacccaccgaatcaaaggaagcaacagtcgtcaaggacagcatgcccatttgcacgtaatgaatgagcaaaaccggtattcccaaggctaaagccatttgaggatcaaacgaagcgattttaaactccttatagcacacactgatcaacactacgtttaaaaccagaacagatgccagcatccaaaacgctttcggcccaatatcaaccccgaataccgtcaccgtattccacggcacaaaagcgatttctcccattaacgagtgctcaatatcgagatggacattcgctccatacacagaaagcaaaataaccccgattgcaaataaggatgtaaacacaactcctatggcagcatctgattgaacccccttgctatgaagaagctgaaccaagaaagccgttaacagaccggttgcggctgcgccaataaacatataaatcccatcgagacttcccgtcactagaaaagcgccgacaatgccaagcaacactgtgtgactgattgcgtcggccagcatcgccatgcttctcagcacaagaaatgtgccgatcaatccgcagcttacaccgactaatacaccggtagctataatccatgcttcaaaactcatttgcgatctgtcccttctcggcatcatgagacgcttttcgacgctcaggcatccgtccatacagctttaagagtgaataaagccgctctctcgtttctctcggtaaacggtccgggtcaaagtagtcctgatcggattctatattggcaagttccatttcatgcatgagatacacttcatacatccgctgcttcaaagctgtgtgatagcctttttctatccctttgcttgtgatttgccaaatcccattttcgatacgctcaatgcacctctcttgttccaagtcatttaatgccttaaggcataatgaaggggataggcgtcttttctttcttacactttcaacagttacacaaagattattcttttcatactgttcataaatcgccaaaagcacttgctccctgcttgttctgcgccgcagcctcatcagccttatggctttagcagccaatccccgcttaggcgcgcaaatcattgaaaaaagaaagagcagcgttgcagataagatcattaatggccctgtcgccattcccttcatcgtggtgctaagcagggttccggccactccgctgaccccgcctgtaatcccggcaatgatgatcatcccggttaatcgttcggtccaatatctcgcggttatggcaggtgtaatcagcatagccgccattaatatcacaccaacagtctgaagcccaatgacgacagcacagacaatcagacaagccaaaagcccgtttaaaaaacgcaccgggattcctaatccctttgcaaacgcgagatcaaaagtaatcaatgtaaattccttaaagaaaacaatacataggagcagtagaacagcggatatccctgcaataaggatgatatcctgcctgaccaatgaagcagcctggccgaataaaaaagaatcaagcccgctttggcttcccgccccctgttgctgaatatatgtcagcagaatgatcccgacgccaaaaaacacagaaagaacaatcccgatcgccgagtcctcctttgtttttgaaagccgaggaatcagctgaatacaaaacgttccgagcagtccggcgagcgctgcccccagcaaaaagaaaggcagtgatttttgcccggtgaacagaaaagcgagacacactcccggcagagctgaatgggccatcgcatcgccgattaaactttgctttctcagcagcacaaagctgcccaaaacaccgcttgccgtcccgagcaaaagcgtaccggccagcacccactgtgtattcggatgctgaagctgcagccacaaactttcaaacattgcgctcactccttatgtccttctgccagcactttatcttttaaaaacgtaagccttcctccatatgttttttgcaggttttcgatcgtaaaaacgttttccgtcggtccgaaagcgattttccttaaatgaagcagtaagatccaatcgaaataatcctcggcggtctgcagatcatgatggacgacaagcacggtttttcctttttctttgagttctgccaacagcgtcataatcgcgcgctccgtcgctgcatcaacacctgcaaacggttcatccataaaataaatgtcagcgttctggcagagtgcccgggcaagaaacacccgctgctgctgtccgcctgacagctggctgatttgccttttcgcataatcatgcatcccgacttttgttaatgcggccttcgccatctccacatccgctttctttggcctctttaataaaccgattctcccgtatcttcccattaggacgacatcgagcgggcttgtggggaaatcccagtcaaccgagccgcgctgcggaacatatccgattctggtccgctgatccttatagtctttgccgtaaatagagatgtctccggaagctctgggcacaagaccgagaatcgttttgatcaaggttgattttcccgcgccgtttgggccgataatgccaataagttttccttcaggcacctgcagcgaaatgtcctgcagtacaggctttttatgataagcaaccgtcacattatcaagctcaacagggaacatatcctccacctcttttctttatttaagcgctttagtaatcgtgttgatattgtggcggaacattccttcgtatgtgccttcttttgtgcccttttcacccatggcatccgaataaagctgaccgccgattgtgactgtatggcctttttctttagcgccttccaccactgcattgattgatttttcagatacactgctttctacgaacacagcttttatttgtttttctgtcagaagatcaaccagctcctgaacatcccttaatccatagtccgaatctgtgctgagtccctgcaggccttttaccttaaatccatactcattcccaaagtacgcaaacgcatcatgagcagtcacaagcacacggcttttctccggaatatgtgcgatctccttacgcgaccacttatctaaatattgcaaatcttctttgtactctttggcatttttccgaaaggcatctgcgtgctgaggcattgctttgctgaattgcgcttcaatttcatccaccgcatagatccataacggaatgctgaaccagacgtggggatcaaacgtcttgccttcccccgcgggaataagcttatttttcggaatggcctcagctactgccgccgattgtttttgttcgccgattttttggaggacatcctccattttcccttccaaatgcaacccgctgtacagaacaacatcggcagacattaattttttcgtgtcaccttgggaagctttgtaaaggtgcggatcaacccccggtcccattaaagaggtgacttttacgtgcttacctccgatgttttctgctgcatcggcaatttgagatgttgtcgctgtcacttgtaattgctgatcagcgctttttccggctgaatccgttccgcatcccgttaaagcaaaggtcgcaaaaagtactgctgccatcagcccttgtctcatatttctcctcctctttgccatcaatgtccgattgttttatcttatgttgtcagttcttagacatgtgacattaaattagccaaaagcatgttttatttacacaggacaaaaagtttccctcatgcaaaattatcgcgtttggccatttttgtcaagctgatttacataaaaaaaccggctgggtcagcagccggtccaaacgagaagggatgtattcaacgaacacttttactgtaacagcacagtgtcatttattcaaaatagcaaaatgcttttttcttaaccatgctgtgtgaaaacatccattttggtcacatattttcgcataatatcttggtttacctcaacccctaaaccaggctgttttgacacagaaataaatccattatcaatacgaatatcaggagttacaatatcttcatcccaatagcgtgaggatgaagatatatcgccaggtattgtgaattgaggcagtgaagcaagcgccacgttctgcgctcttgatatgcctgtttccagcattcctccgcaccaaacctgcatatgatgctctttgcataaatcatgaatttttaaggcttctgttaagccgccgacacgagaaggttttatattaataattttgcagcttcctagctcaatcgcccgtctcgcatcatcaactgaacaaatgctctcatcaaggcaaatggccgttttcaaatgtttctgcaagtggcggtggtcaacgatatcgtcagcttggagcggctgctcaatcatcattaaatgatagtcatcaagctcctttaaacggctgatatccttcagttcgtaagaggaattggcatcggccataagcgggatggttgggaatcggctgcggatggccttgaccaattccacatcctgcccaggctgaattttaatttttattctttgataaccttctttttgatagctctcaatttccttcagcatatcgtcaagaggcgccaggccgactaccaccccggcagggactttatctcttgttccgcccaatgcctcagcaagggatacgcccttctttttggcataaatatcccatacagccgattcaagtcccgcttttgccatccggtttcctttataccgcgccaggctgtccggcacttctgaagggtgattgaattcacggccgacgacatttgggataaaaaaatcttttagcatatgcaaacatgttccaatggtttcctcggtgtaccaaggcgaagagaaagcggaaacttctccccagcctgtgacacctgatgtatcaatggcttccacgatcagaaatttacgctcttgaagcgtttcgatactgtttttaaacggtttctttaagttcatgctcaaatggtaaagcgtgattttttctatttcgatcatagcagttctcctttacgcgcatccttcagctgatttcgcaagagcttattagacgcattgcgcggcaggcggtcaagcacaaagaattttgccggaattttatacttcgccaagcgttctttgcagtagtcagtcaattctcctgcgctcacaggcttgtgaaggacaagataggcgtgaggcactttcccccattttttgtcctcagcccctgaaaccccggcttcggccacagcggggtgtgaaagcagcactgactccacttcggccggataaatgttttctccgccggatatgatcagatctgaacgtctgtctaatacatataaaaagccttcattgtccaaataaccaagatcacctgttttcagccagccattttgaaaggaggcttcgtttgcgctctcccggttaaaatagcttttcatgacattcgggcctttgaccatgatttcaccgtgttcatacggttcacatacctgtccgtcccgctctattttgatttcacacgaaaacagcggtttccccgcagatccgagcttttccatgctgaattccggcgacagggtaacaatttgcgagcatgtttctgtcattccatatgactgaaagacagggaatcctttctcacggcattcctcaagcaatggcagcggtgcaggaccgccgccgagaagaatgcatctgatggattcagggcagcggtttgtttcttccaaaagactggccagcatagtctgcaccgcagatatcattgtcacttcatgcctgttgatagaatgcagcacatcgcttacggaaaaacgctggtgaagcacgacagtcattccatagatcacagatttaaataatgcggacaatccgctgatatgaaagagcggcaatgcgataagccagcggtcttgttctgttatacccaaattaagagcggacgacaccgcactgaaataatggtttccgaacgtttgctgaactcccttgggctttcctgtcgtacccgacgtatacatcagcgttgccgttgcatccatttgcatataagcctcgatctcaatttcctctgctgcttctttcatcagttcatccacatcaatcgtttgaacgatgtgttcatattctttcttctcaaagcttgaatctgtcaataaaaagccggatcccgaatcctccagctgaaacagcctttcatgtgttgacagcttcgtattcaaaagcaccgccttaacaccaagcaaaaaacaagcgtgaacagcgtataccatttctgcacggttttggagcaaaatagctgcagtatcccctttccgaaccgaatgagcggcaagctgttccgccattcgtttagacgcggcaaacaattctgcaaatgtcacggtttggtcttcatagatgagagcgattctctcaggtgtcagctgtgcccgctgcatgagccagttgggctgttctgtcagcatgtcatcatctccgaggtaaaatgtctgtattgaaaagaaaacagcttggaccgcaaagtctcaagctgttggtttactagatattgctgatcacggaaaacgagggaactgtccgaaatcaggtttgcgtttttccttaaaggaatcacggccttcttttgcttcatctgttgtgtagtaaagaagggtagcatcccctgcaaactgctgaattccagcaagtccgtctgtgtccgcgttaaacgcagctttaagaaagcgcagtgcggtcgggcttttttcaagcatttcttcacaccatttaatcgtttcttcttcaagctgttccaaaggaacgactgtgttgacaagacccatgtccagtgcttcctgtgcgttgtactgacggcataggtaccagatttcacgtgcttttttatgtcctacaattcgagccaggtagccagaaccgtaacctgcatcgaagcttcccactttagggcctgtttgtccaaaaattgcgttgtccgcagcaattgtcaagtcacatacgatgtgaagcacatggcctccgccgatcgcatatccggacaccatcgcaacaaccggtttcgggatgacgcggattaaacgctgaagatccaatacgttaagacgagggatctggtcgtctcctacatatccaccgtggccgcgcactttttggtctccgccagaacaaaatgctttgtcccctgcaccggcaagcacgataaccccaacgttttggtcgtctcttgcgtcagcaaacgcatcaatcatttcagcaaccgttttaggggtaaacgcattatgtacctcaggtcggttgattgttatttttgcaatgccattatacgtttcatacaatatctcatcgtatgtccgttttgttttccattcagccatatgatgacctccttttattctctatgtgaatgagtcagatgcttgtcaaaaactcactcactattttaccaaacaatcgcggctgctccacatggaccgtatgtcctgcttttggaacaatctctattctactagaaggaagcatcttatgcacctcttgattgatggcgcaaaatttttcgtcccactccccgcagatcagaagcacaggaacatctatttcctctacacggctccacaaggaaggctgtgaaccggtgcccatgccggttaaactgttcgcaagcccaatcttattgttccgcagacggcccgatcgtatcctgtaccgaatatcttcagccagcctctgctgagatgaaaacaaagggatattctcccaatacgcaacaaacgcttcgagcccgtctcgtaaaataaaatcagcaagcttccggtcccgcatgattcgttcccgccgttccccaagtgttttgagccccggcgtcgtgctttcaagcacaagtgccgatacccgctcgggatatgtcatcgcaaaagagtaagcaagccttcctcccatagaatacccaatcaatttcactttgtgaagttttaattgatcaaaaatctcggcaaggtcagaaacttgccgggttgtgctgtatcttttcccattcagcggggcatcggtttccccatgccctaaacaatcaattttgatcaaacgggaatcaggcagcatttcatcaagaaaagtccatgattgtttgctgccggtaaacccatgcagacagacgacggcttcggaagcattcggtccctcgtctgccactgcatatcggacaccatctgataccgttatgtttacagttcccattgttttttcacttcccgcacagcctcattcagcatatcgcgatgaagctggactcttgattggcgatccgttttgatttcaatcaaatggagtccgggcttgtctgcctgcggcgcgtaagctgttttgaattcatcccaagaagccgggcatgaatacgttccgccgtaaagtgcagccgcatgcttgaaatcgagccctgtcggtgtgccgaacaaatcttcaaagtgtgtcttctcagaagcctgcggcaaaaaggagaaaatccctcctccgtcattattgacaagaatcacagtaagaggaatacccagctttttggccgccagcaggccgtttaaatcatgataaaaagataaatctccaatcacaagggtaacaggcgcttttgttccttcacatacccccatggcagaggagacgacaccgtctatcccgtttgctccccggtttgaataaatccggaaagggcggtcctgcttttcaaaaaacgtatcaacatccctgatcggcatgctgtttcccacaaacagcgagctgttttcaggcacaagatgctgaaggattcgatagagattgccttcaaacgaaacatcttcactgctgattgtttgcagatgctcgcggaaccgcccattgacaaactgccacttttccagccactctgaggatctggtggcagcagtaaggcctgccatgatctcctcagcaaaaacagacgcattacaatgaatcatatgcgcgcttgcctgtgtcgggtctctccaccctccatcctcgtcaatcacgatttgctgaatcgtcggatcatccttaagccataagaaaaccggttttgaaacaggcatcggtccaaaccgaatgacaacatcaggacggagtttccgcttcagctcatcatcttttaaaaacgaatcatacgcatcaataacagtgcttttatcatgaacaccattccgcagattagacagcggatctgctaaaattggatactgaagcgcttttgacagcgcaataatgttttccttgtccgcatcactatggagctctccgcagacgatcattcctttttcagcctctgcgagcatctcagccacatcagacagggactctcggtcaacagactgcgtacccgttttcacagacacatgacggcctgttctcattcttccaaacggctcatctgaaagatccggcatcagcggttcgcgcagcggcacattcacatggacaggccccatcgggcgcttttgtgcttctccggcagcgcggcttgccagcgttcggatgtatctcagcatttgcggagactcttcaggaagagcagagtctgtgaaaaacttaacaaagttaccgaataagaagtgctgattaatagcctgcggtgcgcctacttcgcgcagctcatgaggccgatcagcagttaacacaataataggcacccttgaataatgggcttcaaccacagccggataaaagttggccgcggctgttccagatgtacagatcaatagtacgggacgctgcttcgcttttgccaaacctaatgcaaaaaatccggcagacctttcatcaatttggacatggacgctgatatcgggatgcgcagcacaaagaacagccagcggtgtagatcttgagcccggacaaacgacggcgtccgtaattccggaaagggcgaattcatcaataaaacttccgatgtaatgagtaatcgggttgactgtcaacgcctctcacctcctaatgcagagatcatcggcttcaatttaatctgtgtttcttcatattccgagattggttccgagtcttccacaataccgcacccggcaaacagccttgctgtgcttccttcgatgagccctgaacgaatggcgaccgcgaattccccgttatcctggctgtcaatccagccgataggggccgcataccagccgcgggacatcggttcaatctccctgatcacgtcaacagctttttcctgaggtgatcccccaagcgcgggagtggggtgcagcttctcaattaagtcaaaaatcgaagcagactcgcgcagctgtccgacaatcggcgtaaacaggtgctgaacgctttttgttttgtacaaaacaggtccatcaggcttttcaacctctgaacagcttgatacaaaagcattatgaatcatacctaccacaatatcatgctcaagcaggtttttctcatcgtttaataattcaaggcctatccggcggtcgtcttcttcattcacgcctcgtttaatggagcctgccagacaggaagacatgacagtgccgccgtctcttttgatcagtctttccggagacgcgccgacaaaggttttgccttcttgttcaattgcaaaaacatagcttgtctgctgatcgtccagaagcgttttaagcaccggttcaatttggattggaccgtcaaacgtgagcagcagctctcgggcaagaacaaccttatcatattgtttctctttaatttggcttgtggccgtttcgattgctttcagccaatcatccttatccagctcttcggctgctgcaatcacagcctgatcttcttgcttgaaatcgggaaccataaattccgccgcaaaagcttttaagccttctaaaacagcttctgcgtcttctcctccgcttacccatctgttaactgttaagaacgggccttcagcagtcatcgtcagcataagcgcaggcacaaagaaatccccttccgagaaatggtcccattgtgaacctctttcttcgcaagggtcaaaagaaaatcctccgaataacacaggtcccactgcagaatgctgcagcttttcttcttcataaatatgaaaagccgtctttttaaagcgctcccattgttcaaaaacctcacgataccgctcgctgtttttttgatttgtctggaaaaccgcttctttgccaagaccgactattgtcaattcactttcaggatctgaccaaaaaaatcgattgcctgtatatttttttgctccgtaattgaaaaatgatagagggtcaagagactcgatttgtctcgaatagcttattaagacagcatggttgacttctttggctttatgtaatgcatgtagaacttcctttcggaacgtacgctgcaccgttgtcaccatgagacattcctccataatccttaaaatgcttttaataccatacacctgtgtctcctttgtgtcaaacacagatcatgcagtccaaatggcctgccttacctattataaacctaatttcagaaatgaaaaagaaacaaagcttaaatttctttctccactgatagcaaaggttgtatccgcttaccataaaaggaaaacctcctatattcctccacccgccatttatgaaagttctcaggcgatctgttcatactaaaggtatgcatcacagagaaacgaggcgatcacattgcttacgaaagaacagcttcagcatttaaaaaatgaactggaacaaacgaaaaaagatatcttaaaccgtttcaaagacaatgatcattttcagcttaactcagcctttccttatgattcgtggggtgagctttcggcatacgacaaccatcccggcgatcaggcgacagaactttacgagcgtgagaaagacatcgctctagacttgcatgagagagagcaccttcgggacattgagcattcattgaaggcgatagaaaacggtacgtatggcatttgtgaagtcagcggaaaggaaatccctttcgaacgacttgaagcgcttccgactgccacaaccctcgcggagtattcgtcacaggacgtggtttccaaagaccgtccgattgaagaagaaacaccattcgggcaatttgaatttgatgatgatgaagaaatcagagcgccatatgacagtgaggattcctatcaggatgtcgaaaaatatgggaactcacaaacgccgcaggatatggaaaaccctccgctcagctatgatgatatgacgatgaatgccgaagagaatatcggcaatacggagtcttacgaaaatttcatcgctacagatatcactgggaaagaaattaccgtttatcaaagcagagcccatgagcgctatgaagaagaacttgacgaagagggaatcatgaccacattcggcgatctccacgctgattgaacccccaattattgggggttcttttccgttttcagcatatcgtaaatcagcttcagataatccttttgcaggccgatgtcataccgctcgccctctagcaatttcccgtatacggtacatgccccgagcgaagcttttatcgcatccgttacctgcacttctcctccgctatcagcttctaatgcctccagctcattaaaaatatccggtgtgaaaatataacgccctgctgcggcaaaatgagacggagggttttgtttaggcttttccacaatatcctgtatgcgataaagccctttttcaacaggctccccttttatcaccccgtaatgatgtaaatcctccgtttttgtttcttttaagccgatcacactggactgatatttcgtatacgcttcaatcagctgccccaaagccggctgattggcggaaaaaatcagatcatctggcaaaacgacggcaaaaggctctcctcctgcaaattgctttccgaaagaaatggcgtcgccaagaccctttgcataaggctgccgcacatagtgaatccgtatatccggaatgggatgctctctaagtaaatgcagtttattcttagaggccaaaaaagcctcaagtgccaaagaggaatcaaaatagtcgacaatcagatttttatggctcgatacaaccatcaaaatgtcctcaatgcctgactcctttaattcttcaacaagataatgaatcacaggcttagatcctaccggaaacatttctttcggaatcaccttcgtcaccggcagatttctcgtgccgaatccgcctgcaggaatgatcgctttttttatcatggtattttcccctcagctcatgtttattacatgatattccaagagcgcatcccgatgtttgtacatctgaaattaggcggaagcaactgggcagaaagcggaatcacgaaccagcccttttttaataggatattgatatatgaccagtaatcttgtaaaggagctcaggtgatgaaaatttgtgtggttggcgccgggtatgtcggtttaaccctatcagcggcactggcatccatcggacatgacatgatatgcacagacaaagacgtcaaaaaaatcgggcagctgaaaaaaggagtcattcccttttacgagcctgggctttcagatgcaatacttcgttgcggcaatctctcgttttcttctgaagtgaaatcgagcatggaggaatgtcccgttatttttatcgcagtcggaactccgccgcgttcggacggatcagctgatacgaaagccctgcagtccgtcatcggtgatttaagcgaggcgatccgatcgtataaaaccattattacgaaaagcactgttccgcccgggacaaatgaaaacatagcaaaacagctgattgcctccggagtgtctaaaaacctctttaatatcgtatccaatccggagtttctgcgggaaggcaatgccttatatgacatgctgcatcctgacaaaacagtcatcggtgttcaggaagaagatcacgtatcggcagccatcgtcaaatccatttacaaacacattgataccccttttatcgttacaagcttagcgggagcagagctgatcaaatatgccaacaatttctttttagcggccaaaatttcgttcattaacgaaatggcccgcatatgtgaagcctatcaatcagatatctcagatatttcccgcgctatcggtctagacccaaggatcgggaagcactttttgcaggcaggcatcggatacggaggctcttgttttccaaaggatctgcaggcgctgcaatttgctgcccaggaaaaaaacacggagaccttcctgctccgggccgtgcagcacattaatgacacccagcttggcctgtatatcaaaaaaatacagtcattcttcgaaacacttcaaggcaagaaagcggctgtactcggcatttccttcaaaccgaatactgatgacatccggaattctcaggctgtcagactgatggaaaggctggcggagctgggatgtgatgttcatgcatatgatcctgaagctgtacttccagaacatttgcggcaacatgtaactcagcattctcaagcttttgatgcgatcgaagagagtgactttttatttttggcgacagaatggtctgagtttttagcgtttgattggaaaaaggctgcagatatcatgaaagggcgtcttgtgattgacggacgcaacgtactaaaaaaagaactgatcgaggcttgcggcctgatctgtacgggagttggccgtccatgaaaatactcgtcacaggagcagcgggctttatcggctcccacctctgcgaagaattactaaaagataagaaacataacgttatcggaatcgatgactttatcggtcctactccattttccttgaaattaaaaaaccttaaaaacctgctgccggaaaagcgatttacgttcataaaggaaaatctgctgacagccgatcttgcttccttactggaaggagtggacgtcatctttcatttggcggccataccgggtgtccgctcaagctggggcaatcattttcacccatatgccgcacataatatccaagcgctccaaaggctcctcgaggcgtgccgggaacattctattcaaacgttcgtctttgcatccacctcttccgtctatggcgaaaaacaaggaaaagtcagcgaaaacacgtcgctttctcctttatctccgtacggggtaacaaagcttacgggagaaaagctttgccatgtgtataaacagagctttggcattccaattgtgattctccgtttttttaccgtatacgggccaagacagcggccggatatggcttttcaccggctcattaagcagcaccttcagcaaaagccgcttaccatcttcggtgatgggcagcagtcaagagatttcacttatatcagcgactgtgtcaaaggcatcaccgctgttcttgggaaaccccaccttattggtgaaacagtaaatatcggcggcgcagagcgtgcctcagtcttaaaagttgtctccctcattgaggatatttccgggagaaaagcaacactgcacttttcggacaaaatagcaggggaaccgagcaacacgtgggcggatatttcaaaagcaaaacagctcttgcattatgatcccgccacatccttaaaggatggcttgaccaacgaaatcgcctatttatcgtcgctgtatcagggggaataaaaatgaagcttgcctttatctgtacagaaaagctgccggcgcccgcagtacgcggcggcgctattcaaatgatgattgacggtgtcacgccctatttcagcagcaggtacgacctgaccattttttcaatagaagatccatcgctcccaaaaagagaaacaaaagacggcgtacattatatccatctgccaaaagaacattaccgcgaggcggtagccgaagagctgcgagcctcttcctttgacctcattcatgtgttcaacaggcctttaaatgtctctttatataaaaaagcctcaccaaacagcaagatcgttctgagcctgcataacgaaatgttttctgaaaaaaagatgaccttcgcgcaaggaaaagaagtactcgacaatgtctccatgatcacaacagtgagcgaatttattaaacaaaccgtcattgaacgtttccctgaagccgaggacatcacaaaagttgtgtattccggcgttgatttaaactcttatccgcccgtctggacgatgaaaggctcggctgtcagaaaaacataccggaaaaaatacggtattgaagataaaaaagttattttattcgccggccgcttaagcccgacaaaagggcctcaccttctcattcacagcatgagacggattttgcagcagcaccctgatgctgtactggtcatagcaggcgggaagtggttcagcgatgacagcgaaaaccaatatgtcacctatctgcgcacgctggcgctgccatacagagaccacataatctttacaaaattcattcccgcagacgatatcccaaacctttttctgatggcagatgtatttgtgtgcagctctcagtggaacgaacccctcgcccgtgtgaattatgaagcaatggcggccggcacgcccttaattaccacaaaccggggcggaaacggtgaagtcgtaaaacacgaagtcaccggccttgtcatcgatagctacaacaaaccttcttcatttgcaaaagcaattgacagagcctttacagatcaagaattaatgaacaaaatgacaaaaaacgcccgaaagcatgtagaagctttatttacctttacccatgctgccaaaaggctcaatactgtttaccaatccgttctgaccccgaaaaacaaacaatttccgccgccttttctgacgcaaaattttgatttatcatctatcaatcagctttttgtgaaagcaaaaacataaaacctacagctcgtgttgcaaaacgggctgttttttcgctacagagaacttaaaaaaaggcataaatgtgactttatgccttgcgctttacagtttgagaaaaccatggagctggtttagattcacttggaagaatgatgatttccactttagcttcttccgctaagtctggttcttcatcttcatcctcttcttcatatgggggcgctgagcgtttcgaatcacgctcctcctcaggctccagagtggtttcgaattttgtttcttcttcatcatcgacgattttgcgatctgtttccttttccttcgtttctttttgatattctttcggtgcattgatgtgagggagctctcgaatgctgcccacatctaaatgcttctcctcttcttccttctcagctgagattgagtcatgagcctgccatcccatcggtccaggcggtgtaaatacgaattggtcgagatccagtttagaaatagaggctttttgtctcgatgacctcatgtcaattcgcctcccgatacgcttttatctttttatacagttccggcagtttatccaaaaacgaatctttagattcttcaacagaaatcatgttttgcagcgcccagttatacttctcatctgaccacgttttcttttgcttcaaataatatttgtgcccgattgcacagaacaaatgcggaaacgcgagatcaatccaaagtacctcgtactgtttttctgtgagcggatacactgcgtcgtaggccgcaagcagtgcaaccatgaaatcagtatcccatacagaaagcttaaccatcactttattcagcagaatacgaaggtctcttgacggcaaatcgtaggtaatcgagtgaagctcctttaaaaaaggctccccttcgatctcagtcaaacgtgccaatgtaaaatcctgaaaacagaatccgccatgctcgagtgtctcttttgtccaggtttcgtattctgagtcatcaagcgctctgagagcttcttttcctcttgccagcattttatcagcatgttttaagaaagtttgcgaaaatacgtcatcaggataggatgctgcgatctgcatattcccttcaagttcctgcagcttccaacggtacaatttgtgccattttcccagcctgcttctcttcttgctttcatctgtgcaaacatatccttttgaggcatgatgaaaatggccggcaaatgacatgacttttttcatttgctctgcatcatagtaaatcatttcttttcctgtcactttgtcatataaactgtaagaaacctgatccgtgcccaagcagctaccgccattttttgtttgatgaatcggcgctatcggcagccctttctcttgtaaatgggcgtgtgcctgagtgataaaaagcatccgctccggtttcatttgcgcttcttttagcagctttgggccatgatcagtttcgacttcccagattttgcgcccgcttttgttcgatttcagcgccacatggtcgatatgaaacggataataactgagaatttcggacacaatctgttcttcatgctctttttggtacactctgttcaccccttctatctgttcttttcatagacgctgagcagattttcagccaccctctgccagccaaaattgctttctgcctcacggcggctgtatttcccaagccgttcccgcttttccgagctgctcagcaaatcattgatacgttcggcatattgtttaggattttcaaagtcatgaatgatgtagccgtttttcccttcctctatgacctctggattgcctccccgattgcttgtaataataggaagtcccgcagccatcgcttcataatgcacccttgctaaaggctcctgccattgcgaagagcatacaaatacatctgacatggtataaaggcgcggaatgtcctttggcttcacaaattgaataaatgtgacatgatccttttgcatcgcaccaagggtatgaagatgtttgacatagttatttaattcattatctccgaaccattttgacccgataaacaccatcatgacatcggggtgctcctcaatgatgtccggcaaagcctgcaataatatgtgcgggcctttgactttgctaagccggccgacaaacaagacgatttttttgccgtgaagccccagctcgcttcgcatctcttcgcgagctcgctgcccttcattcgtccagcgagggtggtacgtttttaaatccacaccagaatacaccgtttttgtttttgatcgtgctgacggaaaacggcttgtgatcgtctgtccgatataatcgctgaccgtaacaatctgcgctacggagtcgatgcaaatctcgccttccgcctggctgattttatcgtaagcgaacatttcattgtgaacgcttaaaataaaaacagcatccggcgcctgtttcttcaatttcggaacccagcttgggcgattacaaacatgcacaagatcaaaacggctctttttcagctctgctccaacggcttcttcataacggtcttcatccaaatgcacataatggacaccgtctaccttctctctatcagcgagattcggatctttaatagaaaacacagtcacctcatgtttttttgcaattaaaggggcaaccgcttcgaggtagatttgaatggcgcctcctcgaaccgatgggacaggaagcttctctgtggcgatcagtgctattttcatacatagcctccattcctgcatgatttttaactagttagaatcatgatacggctgaacaaccaacttgtgcggaatgggactgccctaaaaacaaaacgggtaaacaaccagattcatctattaaatatagtcaaataactcaatcattttttccttttgattcataaggtaggagtaaaacaggtaaggatgtgtcctttaatggcagaaaaccatgaagtcattgaggaggggaattcatcagagcttcctttatcagcagaagatgcaaaaaaattaacggagctggctgaaaatgtgcttcaaggatgggatgtgcaggctgaaaaaatagacgtcattcagggaaaccagatggcgcttgtctggaaggtccacacagactccggcgcggtttgtctaaaacgaatacacaggccagaaaagaaagcgttgttttccattttcgcgcaggactatttagcaaaaaaaggcatgaatgttcctggcatactcccaaacaaaaaaggcagcctatattctaagcacggctcatttctatttgtcgtatatgactggatcgaaggaagaccgtttgagctgactgtaaagcaggacttggagtttatcatgaaaggccttgctgattttcatacagcttccgtcggatatcagccgccaaatggcgttcccatatttaccaaattaggtcgctggccgaatcactacacgaaacgatgcaaacagatggaaacgtggaagctgatggcggaggcggaaaaagaagatcctttctcacagctttatcttcaggagatagatggctttattgaagacgggctgcgcatcaaagaccggcttttgcaatcgacctatgttccatggactgaacagctgaaaaaaagccctaacctttgccaccaggattacggaaccgggaatacactcttaggagaaaatgaacagatttgggtcatcgacttagataccgtatcatttgatctgcctattcgcgatttgcgcaaaatgattattccgcttttggatacgacgggtgtttgggatgacgaaacatttaatgtcatgctgaacgcatacgaatccagagccccattaactgaagaacaaaaacaagtcatgtttattgatatgctgtttccttacgagctttacgatgtcattcgcgaaaaatacgtccgcaagtctgctttaccgaaggaagaattagaatcagcttttgaatatgaacgcattaaagcaaacgcattgcggcagcttatttaagaccatcatttcccccgcatatcgggggtttgatatttataagataaagggtaattaaatacatgcggaggttgcaaatatgaaaaagattgtcggcgctttagccgtttttgtgattacatatgcgctgttttcagccgcaggctacctgtttcctgtggaccaagaatggtacaattcattgaaaaaaccggactggacgccaagcggaactgcgatcggcatcatttgggccatcctgtttgccctgatctccctttcagcagccattgtatatgctgcgttttcatttaaaggtgcgaaaagcttttggtttacacttttgataaattacgtgctcaatcaagccttcagctatttccagtttacgcaaaaaaatctgctggctgcatcgcttgactgcctgcttgtcgccatcacagcaatcgtattactgatcattgccaaaaaatacagcagagccgcaagctatcttcttttgccttattttttatggagtgcatttgcgacgttcttatcctttacaatcaattcaatgaatctgtgaacaaaaaaagccgcttatacagcggctttttcacatcatcggcttgatgccccaaatgtccttcgcatattcccggatcgtgcggtcgctggagaaatatccagaatgagcaatgtttacaatcgaatgctcagaccatttccttcgctctcgataatcagcttgaattcgctcctgtgcatctgcatatgagctgaaatccttcagcacaaaatactcatcattatgcggaagcagcgagtcaaagatcgattcaaattcatctgcctctccttcaaaaaaaccattgatcaactgatccgctacctgcctgattctcctgtcatgctgataatattccctcgacctatagccgccgttttcctgatacgatagaacctcatccgcctttaagccgaacgtgtaaatacagtcagggcccacccgctcaaggatctcgatatttgcgccgtcatgcgtgccgatcgtcaaagccccgttcatcataaacttcatattccctgtaccagacgcttccttgcttgcggttgaaatttgctcacttacgtctgatgccggaaaaattcgctcagccatagaaactctataattttctaaaaaaacaactttgatcagctgtttgaccgccggatcataattgactttttctgcgacagaatggatcagcttaatgattttcttggcataataatagcttggtgaagcctttgccccgaaaataaaggtttgcgggtagattgaaaaccccgaatcctccttgaggcggttatacaaatacataatgtgaagaacattcagcagctgccgtttatatgcatgaagccgtttcacctgtacgtcgaatatgctctcagggttcacaaccaccccggccgtgcaaaaaatcaaatcggcaagctcttgttttttcttgcttttgttgttttgaaactgttcaataaatgcaggatcagtggcgtacggttctaaacggatcagtgattccggctgcttgacccattcatcgccgatcgcctctgtaatgatggcagacaagcctggattcgcttttaacagccagcgcctgtgggcaattccattcgtcttattgttaaaacgattcggaaacagcaagtgaaagtcgcgcatctccctttcctttaatatatcggaatgtatttttgcaacgccatttacactgtagctgcctactatggccagatgagccattttgacaacaccatgcgctgtaatcgccatgttctctatccttttccagtctccaggatacttttcccaaactgcacggcaaaacctctcattgatctcttcaataatcatgtacattcgcgggagcagcggcttaaacaaatgaatcggccatttctcgagcgcttctgacaatgttgtatgatttgtataagaaatcgtatgtacagtgatatgccaagcttcttcccagctcatgttctcttcatcgagcaaaatccgcattagctcaggcaccgcaagcgcagggtgagtgtcattaatatgaatgctcacttttttatgcaggccggataaagatttatgtgttttacggtaattgttcacaatgctttttaagcttgcgcatactaaaaaatactgctgcttcagccgtaaaattttcccctcatcatgggtgtcatcgggatataagaattcagaaaccgcttctgtttctcgcttataagacaaaatattaccgccgtgataatgggcatagggctcggcgttccaaagccttaacgtgttgacagtgcccgtttcatagccgatgatcgggatatcataaggaacagcggtaacaattgtcgcttgttcatggcgaaaatgcaggcgcccgcttttttctgtcatatggacttcgccccaaaacggcacgtccactgcttgatccgcattccttacttcccatacgttcccgtttttcagccattgctcaggcagctccacctgatgtccgtctacaattttttgctcaaacaaaccatgcttataacgtatgcccatgccgtgcccaggcaggttcaacgaagcaagcgaatctaaaaagcaagcggccaagcgcccaagtccgccattgccgagacctgcatcgttctctatctgaaggatctcctctaaattgatgccgatttcctttaaaccagcttctacaacatcacgaacaccaagattcattaagttttgctcaaggagctgaccgagcagaaattcgattgataaataatatgtctgcttcccggaatttgatctgcttttttcattcgtttcgatccaatcagcgctgatatactctctgaccatattgcccaacgttttatattgatccagcttggcagaatctttaaagctttttccgcacgtcatttccagacgctttaaaaataagtctgcaaagcgttctttactcgagaacatcccgtccactccttgtcacctgctcgaaaatacgctgatactctttagccgacttcccccagctgtaatctgcattcatagcggtcttcacgatgctcttccatacatcctgttggcaataaaacgacagcgccctttctatcgtaaatttcagatcatgcgcattaaaggcggaaaacgtaaagccattgcccgttccctcttcctcctgataggcacggacagtgtcgtaaagaccgcccgtttccctgacaatcggaatggcgccatattgaagagcaatgagctgccccaaaccgcacggctcaaatttcgacggcatcaaaaacatatcagagcccgcataaatttgatgggctagcggctcatcaaacccgatataagcccggcacttctcatgaaaagcaaattctgcataccggaaataatcttcaaattcacgttctcctgtgcctagcacaaccagctgtatgtcttgctcctcaagaagttcgtgcataattctgcggacaagatcaagccccttttgtttagtgagccttgtcaccatactgatcagcggaatatcgtttttctctggaagccccatccgctgctgaagcttcgttttgttttccagcttgcatgcaagatcccctgaatcgtattgcgcctctatataagggtcgcttttcggctgatagaacgtatcatcaatgccatttaatatgccggttacatcatcttccctatattgcaaaacctgttccaactgctcaccataatacggcgtcatgatttcatttctgtaagtggggctcacagttgtcacatgatcagccgcaatgatgcccgctttcataaaattaacaaatccgttgcattctaacctttcataatgaaaatgatccatctcaagacccagcaagtcatgtgtgacatcaggagggaatatgccttgaaactgcaggttgtggatcgtgagcacgcttttcatccgttcataaaaaggatgttttctgtactcctctttcagcaaataattgaccatcgctgtatgccaatcgtgagtatgaacaatatcggcttgaacattcacaactttggcagcctccagcacagctcttgaaaaaaaggcaaaccgctcaccgtcatcataatgcccgtacaacgaatccctgttgaaatagtactcattgtcgatgaagtaataattcacatcattctctgccatatgttcaattccgcaatattgctgccgccagccgacagctacggtacactcagcctgttttttcatacgctttttccacggttcaggtatttggctgtacttcggcagcatcacagctacctcattgcctaatcgcgcaagcgcctttggcagagcacctgctacatcggcaagacctcctgatttcacaaatggggtgcattctgacacagcaaataatatcttcaagaattcatcagctctccttgcaccaaaccttttcttaatacaagcggctgctcagctgttcctgcagcttccgtcgccttgccgattttaacatccttatccgaaatgacctgctcaagaagacaatcctctccaatctgcgttttttgcataataatgcagtttttcagcttcgtaccctttccgacatggaccgccctgaacaaaatgcagttttcaacctctccttcaagcacacagccgtttgccaccaaagaatttttgacagtgctgtgctttccgtatttcgtaggcggctcatccttcacttttgtatagatcggctgctgcggcaaaaacacctgctgccaaaaacgaggctgaatgagctccatactgtgggtataatatttttccaccgaatcaatgacagcggcataacctgaatattcataagggcaaatggtcagggcggaagattccttttcaacagcctcctgaatggttttatagcctttttcgctatgtccgtagatcagatcctttaaaagcgttgttgacatgatatagatttgcagcgactggccgtcctgaaatacctcggtgacgtcgcagccaacctcctgatggcgtttcagcacatattgaaattgaatgttgcatacggtatggctgttggagattacagcatattgctgagtgcttctgtggaagtaatctagatggtccgaaaactggcgaaaggaaccgaattcatcgtattcgtgatgaagatggggagacgggaaaaaaaagaggccgtcctttttccggtgcaaatcccattccttacccgccccaaggtgatccatgagcgaacggtaacgatacttcggaaaaattgcaacactcctaatatccgcattcaccatgttggaaagcataaaatcaatcagtcggtacctgccggcaaaagggatcgccccgagcgaccgctgtgctgttaaatcctgaagagaatgcttatatgtggtttcatctataacacctaacatttgattattgaacactgactctgccccctcttcagtaattaaatcaattctttttctacaaattcctctgaaacgagcagcacctcttcaatgtctttttcggagcgaatcactgcgccatccggcagcaccatcccattaggaacgatggcattttcaatgactacatgctccccaatcgtcacatccggcattatgacggatgatgtaacagtcgtatgcttaccaacagtcacaccttgaaaaagaacggagtgagacacatttccatatacaacacaaccttcgttcacaagcgaatcttgaacctgcgcatcagatgaaataaattgcggaggctgatttggattgacggagtaaattttccatttgcgttcaaacagcttcagctccgagtcctcttttaacaaatccatattggcttcccacaagctctgcaccgttccgacatccttccaatatcccttgaacggataagcagaaagcttctttttctcttccaaaagcagtggaataatgtctttgccgaagtcgtggctagaataagggttttgatcgtccatctcaagatactgtttcaaaagcggccaattgaatatataaattcccattgaggcaagattgctcttagggaatttgggcttttcatcaaaatgtgtgatcgtcccatctggattggccttcatgatgccgaaccggcttgcttcctcccagcccacttcgatgacagagatggtcacatctgctttcttttcaatgtgataatcaagcattttgccgtagtccattttgtatatgtgatctcctgataaaatcagtacatactcaggatcatactgattcaaataattgagattttcataaatggagcttgccgtccctttataccatttgacttctgatgactcggcataagggggtaaaaccgtcacgccgccattatatctatccaggtcccatgcactgccgatcccaatataggaattcagctcgagcggctgatattgcgttaaaatcccgactgtgtctatgcctgaattagaacagttgcttagggtaaaatcaataatcctgtattttcccccgaaagatacagccggtttggccatattttttgttaatccgctgagacggctgcccttcccgccggcaaggagcatggctacacattgttttttcatctttttatctctcctctttttttaaccgcccgtaaaatcgagatgccgtaaggggggatggtcatcgtgatataacacggtttatgatgaagtgctccctttttagccgataacggctttttgttgatttgccctgagcctccatatgtttcactgtcactgttaagcacttcaatgtattgagtaaaaaaaggaactccaacatcatattgatgatagaccacgggtgtaaaattacaaatgatgacaagcgcctcaccgtgcttttggccataacgaataaaagaaaagattgattgttcgtcattatggacatcaatccattcaaacgattgtgcacgatggtcatgctcataaaggattttgcttttttggtaaaagcggagaagatcttgcgtaaaaacgctggctttctgatgcatggggaaggagtccaaaaaccaatcaagctgttctgtatctttccattcatcaaattgagcaaactctgatcccataaagatcaatttctttccgggatgcactgtcatatagcccagcaaaagccgatactgggcaaatttctgccagtagtcgccaggcattttattgagaagtgatttttttccgtatacgacttcatcatgagaaaacggcaatacaaaatgttcactaaacgcatatagtaatgaaaaagagataagctgatgacaatgccgcctttcttcgggcggcgtctccatgtatttcagtacgtcattcatccatcccatattccatttataatgaaaaccaagccccccttcctcaacggcacctgtcacttgaggccattctgtagaatcttctgcaatcatcatcacatggggatatgcctctctcatggtttgattgagtttttttaaaaaatcaacagcatatggattcgtgtggcgttcatcctgatttggccaatacaagatattagccactgcatcaaccctaaatccatctatatgatagaattccgcccagtacaacgcattcgaaattaaaaaactatgaacttccggtttccccaggtcaaagtttgccgtgccccataaccagttctcccgatcacgttcttctttgtattcataaagcggttctccatcaaacatataaaggccatgtgcatctttacaaaaatgtccggggacccaatccaaaatgactccgatattttgttgatgacattcatccacaaacttcatcagatcatgcggcgggccaaacctgcttgtcgggctgtaataccccgttccttggtacccccatgaacgatcatatggatgctcatacacgggaagcagttcaatatgggtaaacccatgcttcttgatataagggataagcgtctgacttaattctttataggaataatgcctgccatcagaatgcttcttccaagacccaagatgcagttcataaatgaaaacaggtttttcatacagcgtcttagccttctgtttcttttgccatttttgatcttgccagctgtatccttccaaatcgtaagtaagtgacgctgtgtttggtctgacttctgaataaatagcgtatggatctgccttcagcctgatctcaccgttattcgtcacaatttcgtatttatatcgttccttttctcctatacctggaataaataacgtccaaatgccattatcattcactctgtgcatcacatgctcttctccagaccagctgttaaaatctccagccactcgtacttccgacgcatgaggcgcccacacacagaattcatatccgcttttgccattcagctcgcggtaatgcgagccaaacagctgatagcttttaaacagactgccttcgtgaaaaagataaacatcatgtgctgtcgggctggcagcggccatgtaatcatcctttctgacatcatagttttcatttatagtatttattcgaagaaataaaaaaaagccctttcctgaaagcgcttatacttatagacaattaacttcattttctgaagaaaaacgaaatatatggagatttttgtagtctgtttttaaaataaagaacaaaatctaagacatatcatgatttataaaaacaaaaaaaccttgcaggatatgcaaggcttctggatgacccgtacgggattcgaacccgtgttaccgccgtgaaagggcggtgtcttaaccgcttgaccaacgggccgataattatgatatctgtaatcatatggcggagaaggagggatttgaaccctcgcgccgcttacacgacctacacccttagcaggggcgcctcttcagccacttgagtacttctccatttggctccacaggcaggattcgaacctgcgaccgatcggttaacagccgatagctctaccactgagctactgtggaacaaaagtcatggtgggcctgaatggactcgaaccatcgacctcacgcttatcaggcgtgcgctctaaccagctgagctacaggcccatgacgatatagaaatggagcgggtgatgggaatcgaacccacgacatcagcttggaaggctgaggttttaccactaaactacacccgcaatttttatttggggcgattgatgggaatcgaacccacgaatgccagagccacaatctggtgcgttaaccacttcgccacaaccgccaaagcatattgataaatggtggctcgggacggaatcgaaccgccgacacacggattttcagtccgttgctctaccaactgagctaccgagcctaagtatttaaatggcggtccggacgggactcgaacccgcgacctcctgcgtgacaggcaggcattctaaccaactgaactaccggaccattttaaaatttggttgcgggggcaggatttgaacctgcgaccttcgggttatgagcccgacgagctaccgaactgctccaccccgcgatgattaggaatatgtatggcggaggaagagggattcgaacccccgcgggctttgacacccctgtcggttttcaagaccgatcccttcagccagacttgggtattcctccgtatagtggtggaccttgtaggactcgaacctacgaccggacggttatgagccgtctgctctaaccaactgagctaaaggtccattggtagcggcggaggggatcgaacccccgacctcacgggtatgaaccgtacgctctagccagctgagctacaccgccaaatatttttgaaatcaagtggagcctagcggggtcgaaccgctgacctcctgcgtgcaaagcaggcgctctcccagctgagctaaggccccaagaatggtcgggaagacaggattcgaacctgcgaccccatggtcccaaaccatgtgctctaccaagctgagctacttcccgatttcatatagatcatggcgcgcccgagaggagtcgaacccctaaccttttgatccgtagtcaaacgctctatccaattgagctacgggcgcaaaacttaatgccgagggccggacttgaaccggcacggtagtcacctaccgcaggattttaagtcctgtgtgtctgccaattccaccaccccggcgtggatggtatagttggagcggaagacgggattcgaacccgcgacccccaccttggcaaggtggtgttctaccactgaactacttccgcagaaatggtgcggatgaagggacttgaacccccacgtctgtaaagacactagagcctgattctagcgcgtctgccaattccgccacatccgcaacatgtaaatggtgagccatgaaggactcgaaccttcgaccctctgattaaaagtcagatgctctaccaactgagctaatggctcttcttacaatagacttgaatattatatcatataaaagtggtgccggcaagaggacttgaacccccaacctactgattacaagtcagttgctctaccaattgagctacaccggcatatatgtaaaaccgatatgtataatgaaaaatggtggaggatgacgggctcgaaccgccgaccctctgcttgtaaggcagatgctctcccagctgagctaatcctccatacttgcactaacgtgcaattgcttggcggcgtcctactctcacagggggaaacccccgactaccatcggcgctgaagagcttaacttccgtgttcggtatgggaacgggtgtgacctcttcgctatcgccaccaaacaaattgagagtgttctctcaaaactagataacaggtgtgacatcattcaaaaatatggttaagtcctcgatcgattagtatctgtcagctccatgtgttgccacacttccacctcagacctatcaacctgatcatctttcagggatcttacttccttgcggaatgggaaatctcatcttgaggggggcttcatgcttagatgctttcagcacttatcccgtccgcacatagctacccagcgatgcccttggcagaacaactggtacaccagcggtgcgtccatcccggtcctctcgtactaaggacagctcctctcaaatttcctgcgcccgcgacggatagggaccgaactgtctcacgacgttctgaacccagctcgcgtaccgctttaatgggcgaacagcccaacccttgggaccgactacagccccaggatgcgatgagccgacatcgaggtgccaaacctccccgtcgatgtggactcttgggggagataagcctgttatccccggggtagcttttatccgttgagcgatggcccttccatgcggaaccaccggatcactaagcccgactttcgtccctgctcgacttgtaggtctcgcagtcaagctcccttgtgcctttacactctgcgaatgatttccaaccattctgagggaacctttgggcgcctccgttaccttttaggaggcgaccgccccagtcaaactgcccacctgacactgtctccccgcccgataagggcggcgggttagaaggtcaatacagccagggtagtatcccaccgatgcctccaccgaagctggcgctccggtttccaaggctcctacctatcctgtacaagctgtaccaacattcaatatcaggctgcagtaaagctccacggggtctttccgtcctgtcgcgggtaacctgcatcttcacaggtactataatttcaccgagtctctcgttgagacagtgcccagatcgttgcgcctttcgtgcgggtcggaacttacccgacaaggaatttcgctaccttaggaccgttatagttacggccgccgtttactggggcttcaattcgcaccttcgcttacgctaagcgctcctcttaaccttccagcaccgggcaggcgtcagcccctatacttcgccttacggcttcgcagagacctgtgtttttgctaaacagtcgcctgggcctattcactgcggctctctcgggcttgcaccctaacagagcaccccttctcccgaagttacggggtcattttgccgagttccttaacgagagttctctcgatcaccttaggattctctcctcgcctacctgtgtcggtttgcggtacgggcacctctcacctcgctagaggcttttcttggcagtgtggaatcaggaacttcgctactatatttcgctcgccatcacagctcagccttatgggaaacggatttgcctatttcccagcctaactgcttggacgcggatatccaataccgcgcttaccctatcctcctgcgtccccccattgctcaaatggtgaggaggtggtacaggaatatcaacctgttgtccatcgcctacgcctttcggcctcggcttaggtcccgactaaccctgagcggacgagccttcctcaggaaaccttaggcattcggtggaggggattctcacccctctttcgctactcataccggcattctcacttctaagcgctccaccagtccttccggtctggcttcacagcccttagaacgctctcctaccactgttcgaagaacagtccgcagcttcggtgatacgtttagccccggtacattttcggcgcagagtcactcgaccagtgagctattacgcactctttaaatggtggctgcttctaagccaacatcctggttgtctaagcaactccacatccttttccacttaacgtatactttgggaccttagctggcggtctgggctgtttccctttcgactacggatcttatcactcgcagtctgactcccaaggataagtcattggcattcggagtttgactgaattcggtaacccggtaggggcccctagtccaatcagtgctctacctccaagactcttaccttgaggctagccctaaagctatttcggagagaaccagctatctccaggttcgattggcatttcacccctacccacacctcatccccgcacttttcaacgtgcgtgggttcgggcctccattcagtgttacctgaacttcaccctggacatgggtagatcacctggtttcgggtctacgaccacgtactcatgcgccctattcagactcgctttcgctgcggctccgcatcttctgcttaaccttgcacgggatcgtaactcgccggttcattctacaaaaggcacgccatcacccgttaacgggctctgactacttgtaggcacacggtttcaggatctctttcactccccttccggggtgcttttcacctttccctcacggtactggttcactatcggtcactagggagtatttagccttgggagatggtcctcccggattccgacggaatttcacgtgttccgccgtactcaggatccactcaggagagaacgaagttttgactacagggctgttacctcctatggcgggcctttccagacctcttcatctacctcgttcttttgtaactccgtacagagtgtcctacaaccccaagaggcaagcctcttggtttgggctgatcccgtttcgctcgccgctactcagggaatcgcatttgctttctcttcctccgggtacttagatgtttcagttccccgggtctgccttctcatatcctatgaattcagatatggataccactccattacgagtggtgggtttccccattcggaaatctccggatcaaagcttgcttacagctccccgaagcatatcggtgttcgtcccgtccttcatcggctcctagtgccaaggcatccaccgtgcgccctttctaacttaaccgttaaaaagaatcactatgtgatatcttgtgttactaattgaatgtgatgtctactgttatctagttttcaaagaacacgtttcgaaggaatgatccttcaaaactaaacaagacagggaacgttctgtttataagaccttgggtcttatattccgtataatatccttagaaaggaggtgatccagccgcaccttccgatacggctaccttgttacgacttcaccccaatcatctgtcccaccttcggcggctggctcctaaaaggttacctcaccgacttcgggtgttacaaactctcgtggtgtgacgggcggtgtgtacaaggcccgggaacgtattcaccgcggcatgctgatccgcgattactagcgattccagcttcacgcagtcgagttgcagactgcgatccgaactgagaacagatttgtgggattggcttaacctcgcggtttcgctgccctttgttctgtccattgtagcacgtgtgtagcccaggtcataaggggcatgatgatttgacgtcatccccaccttcctccggtttgtcaccggcagtcaccttagagtgcccaactgaatgctggcaactaagatcaagggttgcgctcgttgcgggacttaacccaacatctcacgacacgagctgacgacaaccatgcaccacctgtcactctgcccccgaaggggacgtcctatctctaggattgtcagaggatgtcaagacctggtaaggttcttcgcgttgcttcgaattaaaccacatgctccaccgcttgtgcgggcccccgtcaattcctttgagtttcagtcttgcgaccgtactccccaggcggagtgcttaatgcgttagctgcagcactaaggggcggaaaccccctaacacttagcactcatcgtttacggcgtggactaccagggtatctaatcctgttcgctccccacgctttcgctcctcagcgtcagttacagaccagagagtcgccttcgccactggtgttcctccacatctctacgcatttcaccgctacacgtggaattccactctcctcttctgcactcaagttccccagtttccaatgaccctccccggttgagccgggggctttcacatcagacttaagaaaccgcctgcgagccctttacgcccaataattccggaaaacgcttgccacctacgtattaccgcggctgctggcacgtagttagccgtggctttctggttaggtaccgtcaaggtaccgccctgttcgaacggtacttgttcttccctaacaacagagctttacgatccgaaaaccttcatcactcacgcggcgttgctccgtcagactttcgtccattgcggaagattccctactgctgcctcccgtaggagtctgggccgtgtctcagtcccagtgtggccgatcaccctctcaggtcggctacgcatcgttgccttggtgagccgttacctcaccaactagctaatgcgccgcgggtccatctgtaagtggtagccgaagccaccttttatgtttgaaccatgcggttcaaacaaccatccggtattagccccggtttcccggagttatcccagtcttacaggcaggttacccacgtgttactcacccgtccgccgctaacatcagggagcaagctcccacctgtccgctcgacttgcatgtattaggcacgccgccagcgttcgtcctgagccaggatcaaactctccgataaatggatcacaggttaagttcaccgcatcctgcggcgacacctgtgtgacctgcgtcgtgcaggccctagtttgactgactacgcacatcgcagtgcgatttttaaaaactgaattaacaggtacgttttgtcttgtttagttttcaaagatcatttcgttacttctcaatgaagcagctttactaatataacattcagcttcttttttgtcaacaacttttttcaagttgttttgaagcatctagtttgtgtccgctgtgcatcagcgacgtttaataatataacacctgtatttatttattgcaatagttttttaaaaaaaatctataaaacaaataaactataatcctcgccatgatttctaaagcgtgtgtatcatataagtttcttaaaagaacatatacatcagtcatgtgatcttgttgtttttttcgttttcttgtatagtagaaacgaactaaatactgatgaccacaaggggagcattaaagctgagagtgagcggtttcgttctgaccctttgaacctgttagttaacgctggcgtagggatgtggcaaagtcaaatgaattgcagatcgtaaagcagtgcgtggaacttttctcatccttccgcgtgctgcttttttgttgtccttttggttgtctgtcaatggaaggagatagatatgaatcaatctaagcaactggttcgccttattgaaattgccattatgacagcggcagccgttattttagacattgtctcaggaatgtttcttagcatgcctcaaggaggctcggtctccatcatgatgattccgatctttttaatttcgtttcgctggggtgtcaaagcaggtcttactacaggtttgttgacaggtctagtacaaatagcaatcggaaacttgtttgctcaacatcctgtacagctattgttagattacattgtcgctttcgcagcaatcggcataagcggctgtttcgcttcttctgtccgtaaagccgctgtatcaaaaacaaaagggaaattgattgtttcagtggtcagcgcagtttttatcggcagtttgctgcgctatgccgcgcatgtcatttcaggagctgtgtttttcggcagctttgctccaaaaggaacaccggtatggatttattctttaacttataatgcgacttacatggttccttcattcattatttgtgcaattgtcctatgtttattatttatgacagcaccccgtctgcttaaaagtgacaaagcgtaaaagtaacaatcccccagcgaattccgctgggggatttttcgttatctgttaagaagtgtttttaaagctgaaagatccggccagccaagacctacttctttcagccttactccggcaatttcaaagttgtcctccgctactctttcaggtgaataggcctgataaaatataatcgagggattctgctcaataacccaaacaaacatacttgaaaaaccatgttgaagcaaaaactccgctccttttgctaagagcgccctgcctgcaccttgccgctggcgctcttccagaagataaatagcgtataactcgccgtcatagccttcttgttcagagcgaataggtccaaatgaagcaaagccgaatactgaacccttttcgtcctgagcaacaaatactccctttaacgagcgacttttccatttgtcttcaaattccttatagttcaggctgtttaaataatcaatcgggataatttcgtggtatgttgtcctccagctgtctacatgcacttttgcaatgtcctttatatcctctaacttcgcttcacgtacagttaccatacggttctgccctttccttactctgatttttggatcgttttggcttctttgatttcatttgttaattcattaatgctttgttttacgtttccttttcctgaaaagttctcaagcatttcttttacatcaattcctgaggatgcttttaaactttcttgcagacttgacattaagttcgtcgcatagctggttactttgtttgctccgcttgattcaccgcttcctcctgtatcgacaacggtgattttatcaatatttgaaagaggtgccgctgcttgtttcgcgtattccggaagcattttgacaatcatatcgaaaatcgccgcctgcccgtactgttcaaaggcggccgcaattttctcttttgcttccgcttctgcaagacctttcaggcggataacctctgcttctgtctctcctttcgctttttccgcttctgcttttgctagcccgtcaattcttactttttccgcctcagcctttgccattgcttcaatactgtacttcttggcatcggcttccgcgagctgtttggctttctcagctgctgcggactgctcaacagaataacggtctgcatcggcttttttctttacctctgagtcgtattgacgttcacggcgaagaatttctttttcttctagttctatttgtttttggcgttcgataattttaacctgcatttcctgctctgtgacttgctggcgcgctcgggcagtctctaaatcatatgcttggtcggcattcgcttttgccgtatcttgttctctgcggaattcagccattttgagctgattgattttttcagcttcagcgatttccgtcgcccgttcaagttctgatttttttgcgtctttatcggcttctgcccgcttaattcgggtttctttatcagcctctgctgttgcgatatcagcatcgcgttttacttgggcaattctcggtttccctaatgattcaagataaccgtttttatcacgaacatctttaatggtaaacgagacgattacaagtcccattttcgcgagatcctgtgaagcgacacgctgcacctcttgagagaatttttctctgtttttatagatttcttctactgtcattgagccgagaatggaacgaaggtggccttctaaaacctcccgcgcttcctgctcacggtcgtcttttgatttccctaaaaattgttcggccgctgtagcgatttctcctatagaaccgccgattttaataatcgcagttccatcggccattactggcactccttgttctgtatagacttcaggtgtcgaaacatcgagtttgcttgataataggcttagcggctctgcctgctggaagacgggaaggacaaaggttcctccgccgcggacgattttaatacggttgccgccttcatcgacatgaacatttttattacccagatagctccctgttacaattaacgcttcatcaggccctgctgtacgatacttcgtaataaacacagctattagtgcaattaataaaaagaatacaactccgatgatcattataatcggcattgtcatatcaaattcctccttttatgttaaatgggttcatgcggagtaaccgaaagaactccgttgttaatatctacgactaacaccgttgtcccgtaactgatctgctgattatcaaaactgaccgctgactttgaaatggtcccgcctatcccttctatgaccacttcaccaaacccgtcaaccggcacagctgtaatcactttaccgagtcttcctctgagatcatcttctctatatgccaatgattcttctgcagatgataatggcaccagtacaaagatgtgaagcaataccaccagcatgatcgaaaggatgcaagataaaagcgcaatcagcaagcttgacagaggcaatacaagttcacctatatatccgcccgctgaaaaacatgtaaaaaatgagagcactaatgtcggattaagaaacggaatgccttctgacagccctgaaaatacatctccgaaaaacaggaataacagcgtaaggctgcccgcaataataagcgtataaagatacattgtttgtataggtactccaaataactccaacttcctcatcctttcttcatcaatgcattgatgaacggctgccgttaccatttatacgagacacctcgggaaaagtttcaaaattttaagacaaataacccatttgaagtgctttataaatgataattgcttatatatatggtaatgtcattttaggaggagatatgatgagtatctttaatgaagccagattagaaacgtggaacgaattgaaaggactttctgacgaaaagctgaatcaaaagccttctgctgaagaatggagcatacgggaagttcttgaccatttgaaaaaaatcgatatgaccgcacaaaaaatgttgaaggaacgtgtaaaggacgctccgattaaagaaattgaagaaaaaccgcttgaagtagcacaggacagaaataataaacggaaagccccgagtcatcttgagcctgcgcatgattttatttcaggcagccaaatgaaacgtgagcttgatgtggtaagagagcagctgactgctgcgattgcctctctgaaagaagaagattttgaaagagtgcttccgcatcctgtgtttcaagagctgactgtcagacagtggatcgattttatcggccatcatgaaaaacggcacctcagccaaatgaaagaaattaaagaaaagatagaaagggcctgatttaatcagaccctttctgcttttcgtttgacttttcgctgataggaatgaacttctatttcatcacctgtgtaaacagcaccaggtctctccacaatacagacaatccctctaatgcccagtgcgtggcggacgaaagccgacgccagcttcggttggtccggataataagactgaatgacttctcccggctggatacacggatcattttcgccctcacacagcagagccgctccgctcggaaaaataatccggcttccttcttttaatgaagtaagatctggcataccgctgactgccacattcgccccgagccattccggcaaaattctcggcactcccatttttaaagcgatttcgttgcattcctctattgaaacaattgaaatttgtctgcggttgaaaatttcagtccctcttgaaaacattggttctctggctcccgcttttttggtcaggccaaaatgcaagtcgccggggatgccgccataatcaaaatcaagcttgtccatttgctttgttacgaagctttttgtatctgcgatatataagccttccgcttttgcagtcatacgcttccacatcagctggcaccttccttcttatctaaaatttccacctatgcttcattatcccaaaaaatcccgctctgtaaaggagcgggattttgattataccgttttaggcgtaaggttaaagcagcgtttgtagatccagttgtatgctttttcatttaaatctctagggtttccgaaggtttgcggatctttcattgcttctttagacaagcgttcgatcatatcaggtgatactccctgctcttctaaagtcggcacttctaaatcttcgaccagatcatacatccaattgacagatgctttcgcagcttcttctgttgtcatcttgcttgtatcaataccgaacgctttcgcaatacgcgcaaacttctcaggatagcccttccagttgtattccatgacagggcccatcatcgccgctacacattggccgtgagcgactgggataataccgccaagcgtttggctcatcgcatgagcagcgcccgctgattcacttccgtaagaaagaccggcaagcatcgcagcctgcgccattccgtaccttgcttccagatcctctccatcagcaaatgccctcttgatgtaatgagcggcatactcaatcgccattaaggcaaccgcatccgtgattggctgtgcaaatttcattgtatagcactcaatggcatgggcgagcgcatcaattcccgtcatagctgttacatgcggaggcattgaaacatgaagctcaggatcaatgattgtcaagtgcgctgcaatcagcggaccgcccgtgttgaatttgaattctctttcttcatctgtgataaccgcccattgggttacttctgatccggttccagctgtagtgggaattgtcgtcagcggaggaatgcggttttccagcggttttttcccatctgccgcttcataatcaagcacgcttccttcgtgagtcgcttctactccgattgcttttgctgtatccatggagcttccgcctccgactgccaccaaaccattacagttctcttttttgtaaagctcagatccttcattcaccagacggacaggcgggtttggctcaactttattaaagagtaccacttcaatgcctgcttctttaagtgattcgattacgggatcagcaacaccggctttataaatcccagggtctgtgacaaggagcgcttttgaaacgcccagtgcagctacttcctcacccgtatgcttgatggctccgattccatgcttaatcacagtcggaatttcaaatgtgtggaatttctgcatgctttctaccttcatatttaatgtcatcatcaatctccccctcttatgaattaaaccagttaaccgctgccggttttgtattgcggtatacatgtttgacttctgtgtattcttcaaggcctatttttccaagctcgcgtccgaacccggattgcttatatccgccccatggcgcttgtgcaaagtacggatgaaaatcgttgatccaaacggttcccattctcaagcgggctgctacccgttcgcacttttcaatgtcttttgaccataccgctccagccaagccatagatggtatcattcgcaagctcgattacctcttcttcagagctgaaggtttcgactgtcaatacaggaccgaaaacctcttcctgaacgattctcatgtcagaattacagtttgagaaaatagtaggttcatagaaaaagccgttttgaagctcaggatcttccgggcgtttgcctcctgtctccagcttcgcgccttcctctattccgatctctacatatttttctacctttgccctgtgctccgccgaaataagcggaccgctttctgtctcagcatgaaaaccgtttccgagttttatgcgttttgcccgtttgaccagctccgccaaaaattgatcatgaatggcatcctcaacaagcaagcgggaacctgcagagcatacttggccggcgtggaaaaatacagcgtttaaggcctgatcaaccgcaacttctaaatccgcgtccttgaaaacaatatttgggtttttcccgccaagttcaagggcgatttttttgacgtttccgcttgccgcccgcatgatttttttgcctgtttcaattccgcccgtaaatgaaatcaaatcgacgtctttgtttacggcaagctcgtcgcccactgtggctcccggtccaagaacaagatttgcgacaccttttggaacaccggcttcttccatcagcttaaagactttgattgtcgtcagcggcgtaatctcactcggcttcatgacgattgtgtttcctgcggccagtgcaggggcgattttccagctcgcttgaaggagcggataattccatggagtgatctggccgcaaaccccgattggctccctaataattttgctttctgaatcaggaatcggagatgaaatgatctctccgccatctttgtctgccaagccggcgtaatattgaaaaacattggcgatatcgtccatatcggccttgctttcttcgagtgtttttcctgtatcaagagattcaagctcagccagctcctcaagatcgcgtctgattaattccgcaattttcagaacaatttttccgcgttcaagcccggatagcgatgaccattctcctttgtcaaatgctctacgtgcggctgcgattgctttgatggcgtcctctcgccctccctcgcttacagttgcaatttcttcttgattaaatgggttgataatactgcggatctgttctttttcggcactgatccattctccgtcaatgaataatgtttgactcatataagcctccttgacgtaaataaagtttgttaaataaaaatttaatgtttttaacaaccttaatctaacatatggtttttaaactgtcaaagtcccattttgatttttctttttgacttttcctcatgtttcgttaagataaagaacataaagaaataacttaacgaatttaattttctaaaggaaaagagggtcagtatggatgaaaatccagaatttgcagctatagaacaggctcgggatcttgttattgactccattgctgaaacgatggatctttacggaattacccgcagtgtcgggattttatatgggacgatgtatatgagggatgagatgacgcttgacgaaatgcgtgaggagttgcaaatgagcaaaccaagcatgagcactggcgtcaaaaagcttcaagacttaaatgtagtgaaaaaaacatttcaccggggcatccgcaagcatacatttgtggctgagaaggatttctttaaatttttcacaaatttctttccacctaaatgggagcgggaggttcaagtgaatgtaacagcgatcgaggaagctcaagctgatttacaaaaggttttatgcaaggaagatctcgatgaggatatcaaaaatgaagcactgcagttatatgatcagctggaaagctctaaagcttactatgactggctgaaacggcttgctgaatcggtgcagaccggagaaatttttaaatttataccggtcgaaacaaagtaaagcagaaaacgcctgggaaactaggcgtttttttgatgtaactactacaaatttgaaaaatacgggaaaaacaccccatttacttccaaaatatttgatggtaattttatgtaggtaaaatttgtatttggcctttcagaggaggtgaaaagcgggcaggcctgtttaatttatcattttttagggggaattttgttatgaaacgcaaattattatcttctttggcaattagtgcattaagtctcgggttactcgtttctgcacctacagcttctttcgcggctgaatctacatcaactaaagctcatactgaatccactatgagaacacagtctacagcttcattgttcgcaacaatcactggcgccagcaaaacggaatggtctttctcagatatcgaattgacttaccgtccaaacacgcttctcagccttggcgttatggagtttacattgccaagcggatttactgcaaacacgaaagacacattgaacggaaatgccttgcgtacaacacagatcctcaataacgggaaaacagtaagagttcctttggcacttgatttgttaggagctggcgaattcaaattaaaactgaataacaaaacacttcctgccgctggtacatatactttccgtgcggagaataaatcattaagcatcggaaataaattttacgcagaagccagcattgacgtggctaagcgcagcactcctccgactcagccttgcggttgcaactaatgtaaaagaccggttaacgccggtcttttttgcgttttaccctcccctttttctctaatccccgttatcttttttctggtttaaaatttaaattgacaaacactagaaacaggagtaaattcttgagtgttcaatttcatacagtctcttttaccgcttaatcaaacacgaacgggggaaccaacgattggctgttttattaacagccttggggtgaatcttactaagtaagagggggtactctgaatccctaatccgacagctaacctcgtaggcgtatacagagaggaggtctattatcggccattctttgcaatggtcttttttgtttcaaaaacgttaattcactaagggagatatgaacattgggaagaattaaaaataagcaatttgccgtgatcgggctgggccggtttggcggcagcatttgtaaagaacttcatagaatggggcatgaggtccttgcggttgatatcaacgaagaaaaggtcaatgcatatgcttcttacgccactcatgcggtaattgccaacgccaccgaagaaaacgaattgctttcattaggaatacgcaattttgaatatgtgattgttgccatcggagcaaatattcaagcgagtacgctgaccaccctattattaaaggagcttgatattccaaatatttgggtgaaggctcaaaactattatcatcacaaggtgcttgaaaaaataggcgctgaccgcattattcatcctgaaaaagatatgggggttaaaatcgcacaaagcctttcagacgaaaatgttttgaattacattgatctatctgatgaatacagtattgtcgagctgctggctacgcgcaagcttgattcaaaatcgattattgacctgaatgtaagagcaaagtacggctgcacgatcctggccattaaacatcatggagatatctgtctttcccccgcgcctgaagacatcattcgcgagcaagattgcctggtgatcatgggccacaaaaaggatattaaacgttttgaaaacgaagggatgtagacaaaggtgacacttcaaaaggataaagtgatcaaatgggttcggtttacaccgcctcaagtgcttgccattggttttttccttaccattatcatcggggctgtcctattaatgcttccgatttccactacgaagccattgtcatggatagatgccctttttactgcggcttccgctacaactgttacagggcttgctgttgtcgataccggcactcaatttacggtattcgggcaaacagtaattatggggctgattcagattggcgggcttggatttatgacatttgcggtcttgatcgtcatgatattaggaaaaaaaatcggcttaaaagaacgaatgctcgtccaggaagccttaaaccagccgacaatcggcggtgtcattggccttgtcaaagtcctgtttctgttttcgatcagtattgaattgatagcagcactcattttatccatccggcttgtacctcaatacggctggtcatccggcttgtttgcaagtttgtttcacgcaatatctgcttttaacaatgccgggttttcgttgtggcctgataatttgatgagctacgttggcgatcctacagtgaacctcgtgattactttcttatttattacaggagggatcggatttacggttctgtttgatgtgatgaaaaatcggcgttttaaaactttttctttacatacaaagctcatgcttacaggaacgctgatgttgaatgcgatcgctatgcttacggtctttattttagaatacagcaaccccggcacgctcggccacctgcatatagtggataaactgtgggcctcctattttcaggcagtgacgccgagaaccgcagggttcaattctctagattttggaagcatgagagaaggaacaattgtatttactttattattgatgtttatcggagcaggaagcgcatcaacggcgagcggcattaagctgactacgttcatcgtgattttaacatctgttattgcttacttgagaggtaaaaaagaaacggttattttccgccgttccatcaaatatccgattatcattaaagctttagctgtgagcgtcaccagtttgttcatcgtgtttttagggattttcgccctgacgatcacagaacaagcgccatttcttcaaattgtgtttgaaaccttttccgcattcggaactgtcggccttacgatggggcttactcctgaactgacaacagctggcaagtgtatcatcattgtcatcatgtttatcggaagaattggtcctttaacgttcgtgttttcattcgcaaaaacagagcaatcaaatatccgttatcctgatggcgaagtgtttacagggtgatatcaaaaaaatccggcgtgcagtcgccggattttttatgattcgatatgagattgattttgtcttttttcctgttccgcgatgatttcgttatcctccgcgttatcacgggtcactttttgcgtaagaatcgcaccaactgctacaagtatcataacagcgatgtaataacctttttcattgagttccagattatcagcattatagagtccgatactaaacaaaaatactcccgcaaaaaaagtaaaataagctagtactgtaaaggcaaccgtgtttctgcgtctatatttctgcacctttgttccctcccgaaagcatagttaaaaagtgataacttccgtggaatattatacctcaaattccccggaatggaacaaagaattaaaaataccagtaaaaagggcttaggttgcctcctttatttcaacagctgaatcatcaatccagccgataagtttatcattgatttggaattggtaccatacagactggcctttctgttttttagacacaacctttatgtctttgccgacgtaagattgggcagaggtaagccttatggaccgatcatcagtagaaggcttggaccatacgtcttgaacggcactgtctttaatagaggcgtttaaatccacagatttgagggatggatttacctcatcgtactcatctaaatcgtatttttccacaatagcgctgattttgtcagcgtagtcagggtctgtagcatatcctgatgtttgcagggcggttgccgcttccttataattccctgcctcaagcaccggtttatacttctttttattccacgatgtgccacggacgaacaattgggcgtgatcatccatagattcaaaaaacgtgctgtattttcgaaacttcgcgcgaatggtttttcttttccctttttcaacttcgtccgtttccatcgtgacatgatggcctttataattcccttttacgccaaaaaggttgttggccttagcagccagttcactgttcccccagtccgattcgagaatggcctgagcaattgtgatgctggggagaacatggtatttttcatacaaaatttgggcatgtccggacagactgtctataaatacttgctgttcatcgatttcttcagtttctttggatatttcaatcggttttgataaagttgtcgctaaaacaaacagagctagcggaatcgatacaaggaaaaatagtgaaatcaagagtttacgttttttaagttttttacgggccatgaaaaccttccttcgaattaaaagattacgaatgtaaaagaatctaccttttagaattttacttgcacttctaatatttttcaattctttagggataaagttgggaaaagattgcaaaataaaaaccttttcgctcaatgaaaaggtttttaccatgtttctatttttgtaaatttctgagtgcattccgatattccgtatcatttattactttatatgatttgacagttgccttcgacaaaccttgtgctgagacggccggtttttccggagctgttttcgctttatcatgtggtttatgtgccagcttgtgccccattccagtggcattcatacaaaatgacaggcagacgagcagcacgctaaggataaaagaaatgaagaagagatcatgataagcagtcatcatagaatcctgtaccgaaccgctttgtctggcagcatcttttttcgtgaaaaagccgatgagaatgggaactcccatatagacaaacaatcttaaaaactgaacagctgtcattctcttgaccaaatcaggcagcgggcctcccatggcagctcccatcagccctgcggcgactgtcaggcctgttcccgctgcaagcatgataaacagtgccgcgaacatataaagagatgatcgatcctgtatatgcagccattgaaaattcacaaaaacgagaatgagtccgccgataataccgagcatccctggtccgactttatcgtataacagagcgctcaaaatggccgcgatcgccactccgattaaaagagtcaagcttaaaagaatgagatgctcctgagaaatatcatacatttgacggagcaagccttgaaaagcagaaaggctgacagctaccgttatcgtccctgcagctatgatcaataagccgagcaccggttttggcagcagcatcagtttaatagatatgaaggggtttttcactttatattccacaatcaatagaccaatgagcaaacataacgtcaccccgaaaccaatccatacataacccgatgacagcccccatttttgcagaaaaatgaatgaaaccgctgaggctgcggcaaggaagacagataaaagaattcccgcacgatcaagcggctgttcttgatccgccgctccgtgatgctcatcatgaagaaagaaatagctcaccgcgacaccgatcagggacaaggtgccaaagatgaaaaacagccatctccaatgcccgcagcttgttgcaatggttcccaggattgtaccgatgataacagaaccatagaatcccccgatcagcacaagcagtgcatagttcctgcgttcaatcgggaatgacagtacaagcattggaatcataatcatcagcatgacgcctgttgccgccccttgtaaaaagcgccctgccgccatcaatgcaatatcgcctgaacatgcgatgagcagtgagcctagtataaagacaggtaatgaagccagatagacgggacgagcaccgaattttttcctcagcagcggtcctgccggaactaacaaggcaaaggccatattgccgatcaatatcggatttactgatgtaaagacacttgttccaaccgttttctgaacaaggccttgaactgacgacaatgccgtgttagacatcaatcccggcccgaccgctaagacggcgagcaaagaaatcacccaatagtgttttgtcttcatgttgtcatcccttcctatatgaatacatgcgaaacacatcattttttgaaaacaaaagaagctaatagattttgcataccattagctttcattctaatattctccctttcaggggaaatgatattattttattataattatgtgaatgaatgagcatataatcaaatattatttcaaatcgattgtgttttgtcaatggagtaaatttcaagcacaacatagaaagcttgaaagcttttccccgatattgtgtctagaactgcacttatgaatccctgctcgttccctcaagcgaattaaagcaggccgttttaatcctttcaatccactattccaactaataaactcaaataagttggtgataagacaacattttacccccacatttttttgtgttcactgggcgtttgccgcctctaaattgtatatgggtaaataccatgaattaacctatgaaataccaatgtaagggaggcaaaaacgaatggaactgtatgagtgtatccaagacatttttggcggcttgaaaaatccatcggttaaagatttagcaacgtctttaaaacaaattccaaacgcagcaaaattgagtcaaccgtatattaaggaaccagaccagtacgcttacggccgaaatgccatctatcgaaataatgaattggaaattatcgtgattaacattccgccaaacaaggagacaacagtacacgatcatggtcaatccattggttgtgcaatggtgttagaaggaaagcttcttaattctatttatcgttcaaccggcgaacacgcagaactctccaattcatactttgtccacgaaggagaatgccttatttcaaccaaaggtttaattcacaaaatgtccaatccaacatctgaacgaatggtgtctcttcatgtctactcccctcctttggaagacatgacggtctttgaggaacaaaaggaggtattggaaaattcatgattgacagataaactgctcactttgacttcactcaactggaggattcagagaatgaaaccttttcctcaaaacaaaaaaacccttatcgaataagggtttaaaggtatggagccaagggggctcgaacccctgacctctacgctgccagcgtagcgctctcccagctgagctatggccccgtatgtaacgtcatgtttattatagatgattttattttgaaaaacaagctgtttcctcttgaattgacagaaaaaataaggctcggaaaagagccttatttttcgacttacatcatgatcaaaagtaaaatcacaccgagaataattcgatagattgcaaatgggacaagtttgattttgttaatcagccttaagaagaaacggacgacaaacagtgcgaccacaaaggcacagataaagccgacgatgaaaaacggcatcagatccgaacttaagctgtcccaatgcttcacgaggcttagaaagctggctcccatcatgatcggcatcgccataataaacgtaaagtcggctgcagctcggtggtttaatccgagaataacaccgccggaaatggttgaacccgaacgcgagaaaccaggccaaagggaaagacattggaataagccgacggctatcgcctgtttataggaaatgcggtcgagtgtgtctgtcgctgttttccgtttattgacccagtcagcaaaaagcatgaggattgccccggcaattaaaccgatggccacagttttaacggaaaataaatattcatcaatgtaatcttcaaacaaaaagccgagaacagctgcaggcacgagtccgacggcaatttgggcaatgcttaatttatgtccctgctcctggtcgcttgtaatattttttttcaagcccagtaaatttaaaattcggtctttaaacacgatagctactgctaaaatggagcctagctgaataaccaccttgaatgagttagcagcttcttctgacatcagattacttgattttagccagatgtcgtctactatgatcatatgtcctgtcgaagaaaccggcgcgtactctgttaatccttctacgattcctaaaatggcggctacaaacaattcccatagagtcatgattttgattctccccattagacatttatttttttacataacgggagcttcccataaatggaaagcccgtcttatataactataaacgaaaatcacactttatgccccggcgtattttcatttttttcttcatcgtataaatgtgactgcattttaaaccagtcaaataaatgtgtcgtaatgactttggcaaccgcatagccgggaatcgcaagaatgattccaacaacgccaaacagcttgccggctgttaacagcagaaaaataatcgtaatcggatggatgtgaaggttttttcccataatttgcggagagatcagcttcccttcaatcagctgaacaatcgtccaaacgatcaccagcttaagcagcatgagcggcgatgtcactatggcaatgataatcgcaggcgtaatggcaatcgttggccctaaatatggaacgatgcttgtgcaagccgcaatgactgcaagcaatgaagcataatccagcccgataatcaaataaccgataaacagcaaaaacccgatacagaagctgacaatgatctggcctctgatataagagcttaaccgatgattcatttcgcttaagactgtatatgtctgttctttcaatcgagtcggcacaaacttcagtatgtagaccggtaattttcttccgtcttttagcaaataaaatagaataaacggaaccgtgacgatcgaaatgataatctcagtcagtgcgccgataaaattcccaacaccggtaaaggtgctgttcacgatcgtcgctgcctgatccgaaacctttgtagcaagatcagatatattaatgttcatcgtttgctgggcctgattgacgaagttgctgccaatcagctgtttcgtctgattttctacgacgtccacatatctcgggatattgtcaatcaaactcataatttgttcttttaagaagggaatgatcgacacgatcgtgatcgtgatcagcccgataaccaataggtatagcagcaatatagaatagattcttcttattcttcttctctccagaaaatcgacgactgggtttaacagataaaaaacaatgcctgtcaaaataatcggaagtgatatcgttttgagcagaacaataatcggggtgaaaataaatgatgtttttgtaaatactagaatatttaaaccaatcagcagcagcacaagcaaaaataaaacaaacttattatccaagaagaatcgcttgaatctgccgctccatgtttgcaacgtctccactatcgttcctccgtcatacatagtttaattaaattgtacactatcgtccctataatgaaaaataaaaaccgttaattgctggaaaagctttctcggttttaacattctatttatatctatcatgtgattttgttctttttaagctataatttagctatatcatgcaaaaggagcgatacgagtgatacgttttgcaataataggaaccaactggattacagaccgctttcttgagtcagcagcggatatcgaagattttcagctgactgctgtttattcaagatcggctgaacgcgctggcgagtttgctgctaaacacaacgctgcgcatgccttctcagaccttcaggaaatggcggcgagcgattgctttgatgccgtatacatagcgagcccgaacgctcttcacaaggaacaagccgttctctttatgaaccatggcaagcatgtgctttgtgagaagccgtttgcttcgaatacaaaagaaacagaagagatgatctcagcggctaaggcaaacggcgttgttctcatggaagcaatgaagaccactttcctgccgaatttcaaagaactgaaaaaacacctgcataaaatcggcactgtccgcagatttaccgcaagctactgccagtattcctcacgatatgacgcgttcagaagcggaactgttttgaatgcgtttcagcctgagctttccaatgggtcattaatggatattggcgtctattgtatttatccggctgttgtgttgtttggcgcgccgaaggatgtaaaagcaaacggatatgctttatcctccggagtggacggagaaggaactgtcattctgtcttacgacgggttcgaagctgttctgatgcattccaaaatctctacttcctatgccccggctgaaatccagggtgaagacgggacgattgtaatcgatacgattcaccggcctgaacgtgttgaaatccgctaccgggacggccgccttgaaaacatcgcgatccctgatcctaaaccggcgatgttctatgaagcagaagaatttgtcacgcttataaaagagaataagctggaatctgaagaaaatacatttgaacggtctttgaccaccgcaaaaattatggaagaagcaagaaagcaaatggggattgtataccctgctgatcaagcttaaaaaaatccgcccgcgtgcaaatgccgcggcggattttttattagacaatcggagaagatgccttcctttttaaaagcacctgttgctcatattctttgatgtcataaagccatgcctcttttaccggaacgcccatttgctcacagtaggaatcccagatggctccgaaaggatatgttttgaattcctccatcagggccagcctttctgtatagcggccctcttcctgcaattgttttaaatatccgttcgggagaagcagggcatacaataaagctttgatcatatttctcgttccgatggtccaggcggctacacggttaatgctggcatcgaaaaaatccagaccgatggctaccttctcaagagcatgatttcgtacaatttcaagagcgatttctctcaattcatcatccaaaaccactacatggtcgctatcccaacgaacaggccgcgatacgtgcaaggcaagcttgtctgtgtaaagcagcatggacgagatcttgtttgataccgtctcagtcggatggaaatggcctgtatcaagtaaacaaagcttatgattcgtcaaagcataagctaaataaaattcatgagatccgacaacatatgattcggagccaagcccgaacagcttgctctcgattgaatcaagattatgttgttcactgatctcctctgagaagatccgatccagtgattcttttagtcttttacgcggtgtcagcctatcactcgggatatccttatagccgtcgggaatccaaatattcgtcaagcaaggtgttcctaattctttcccgaagtattccccgatacggcggcaagcgatgcaatgcctgatccaaaattctctgatgtccggatcagggtgtgaaagggtgagtccgtcagccgctttctcatgcgaaaacaaggttggattaaaatctaaaccgagaccaaggttttttgcccatttcacccagttttcaaaatgctgcggcttcaattcgtcacgttctaccgcttccctgtttgtttctgcgtatatcgcatgcaggtttacgcggtgctttccaggaatgagagaaagagccttctccaaatctcttcttaattcttcaggagtttgcgcttttccgggataattgccggtcacgtcaattccgcctgaaagctcgcccttatttacttcaaagccttcaatgtcgtcaccctgccagcagtggatcgaaatgggcacttgctctaattgccgaagcgcctcttcaacatcaattccccatttttcatatgcctgttttgcactgtcataattggcttttatggtcatacggctctctccctttatcagtttttcaatccaaataaaaaacttcctttagatctatcgcaacaggactgaaatccgaatttgttttcattaatggcgccatcgatttccaccatctttggcaaacttccgtgtccgccatctttctccatttctcttcatcctctatttctaaatatgcaaaaagcctgcctgtttcctcgtctagaaaaatggaataatggtgtgctccatgagctttgagtgcttctgccatctcaggccaaatgtcatcatgccgctgtttgtattcttcgtacttgtcttgatggacaaacatgatactggcttttcttttcaaaccttttcacctcttcatcatttagatagcgctttcaaaacagtttgctgaaatgactgaatgatcgtgcttctatcaatgtctttaggtgtaaacactttgatcggaaaggaatttctgacgacttgccgggcttcttttatgtctttgacttctttggcagcaatcatttgcatcaaaagatttccggtggcagttgcctctatcggccctgcatataccgcttttccactcatgtctgccgttaattgatttaagaaatcattccgggctccgccgccgatgatatgaaattgctcgatcggtttttctgtgattgtttcgagctctttgatggctatcgcatagatgatggctaaattgctgtagatgcagcaggcaagttcgcctgcagtacggggaatcttttggcgggtttgtctgcaataatgttgtatttcctttatcatgttttctggattcaggaaacgtttatcatttaagtttataaattgctggaatggttctgtttttttggcttcttctgcaagctgctgaaaagaataatctgcttgtagctgctgtttgacttcttgtatcacccacatgccgataatgtttttgagaaagcgaatggtgttgtttgcgccgcgttcatttgtatagttgttttctaaagcaagatcagttattatcggtgttttgttttcaaccccgattaacgaccatgttccgctgctgatatacgcccagccatcatttacgcctggcgccgcaatgacggccgaggccgtatcatgtgttgcgactgtcatcaccttgcacgccgggagatcataatccgggaaccactcatttcttagcttcccgagttcacaccccggttcagtgagcggcgcaaattgctgttccagaacagacacggcttcaagcaattcaggatcaagatttcccgttgagacgtttaaaagctgtgttgtggacacgtttgtgatttccgttacagcttttccggttaaacaatagcctaaataatcaggaatcatcataattttgtctgtctttttcagcagctcacggtcttcttcaaacaattgatagatcgtgttgaaaggctgaaattgtattcctgttttttgataaattgcggcttttgagagggtatgttccagtttgtctattgtgtgatctgttcttctatcacggtaggagattgcttcccgcaaccgatcgcctttttcgtccagtaagacataatcgactgcccatgtatcaatgcctacggtgcagtgttcatacccaagcgtctttactttttgcagtccttgcaggatttgttttagcaaatgatcaatatcccataagcaatgcccgtctctttgactgaaaccgttagcgaacctgtgaatctcttgtatgtcaagcttcccttcattcagttcacctaccatgattctcccgcttgatgcgcctacatcaatggcagtataaatcatcctttcaccctctcttcgaaagaggaacagctgtcaccttcacctttttgtcctcaagagcttttaccgatgccggatcaagtccagaatccgtaataaggcggctgacatcttgcagcgaggcgatatgtgaaaactcgcggttcccccatttgcttgaatcggccatcaaaatggtctggtccgacctttcgatcatccgttttttgagcagcgcctgccactcatttgaatcactcatcccgttgtgtacgtcaaatcccttacatgacagaaaggttttattgacatgataggtctcaagtgaacgctctgctaacgggccggcaaatgataatgatttttccagcaaaatgccgcctgttgaaatgactgatatgttttctttattgctgagttcaatagctgctttcattgagtttgtaatcacggtgagctcaatgtcagggagtatttttgccatgtaccaagcggttgtgcttgcatcgagaatgattcggtctccgctttttacatatttggccgcttcgtgagcgatggcttttttttcgatgacattcgtgatttcccgttcagaaaaatgaatttctgattccttctgctgaatactgaccgctcctccgtggctccggctcagtttatgttctttttcaagcttttcaagatcacgccgaatggtttcctctgtgactgaaaaaatgtcacttaattcggaaacgcggatgcttgaacgcatatttactatttccactattttttgctgccgttctgctactagcatcggtaacgcccttcctcatatcgtagtccgtcttatatttttatcatagcatatatctaacgcgtaaaagcagcagggacgccgccgtctaccgtgatcatgcagcccgttgttttttcggctttggaagaagcgaagaatgcaatggcttcggcaatatcctccgggtaaatattgacgagcaatgctgtccgtttccggtaatgttcctccagctgatccggttcaatcccgtacgccgcggctcgttcctcacgccagcttgaaccccagattgccgatccttgaagaactgcatcaggcaaaacggagttgaccctaatgccgaattctccgccttctgctgcgatgcatcttgctaaatgggtttcaagcgccttaacagagctgtaggcagaggcgttttttcccgcataaactgaatttttcgatccgacaaataccatgcttccgcctctattttgatgtttcatctgtttaaacgcttcacgggctacaaggaaatagcctgttcctaaaacattcatattaagattccattcttttagacttgtttcgtcaaatgggcttgatgtggccagcccggcattattgacgacgatatcaatgccgccgtaagcaagcgccgctcgttcaaaagctgactgtacgtcttcctcctttgtcacatccattttgacagccattgcccgtccttttccgtatgcatcgtttatttccccggcaattttctgtgcgccttctatattcagatcagctacgatcacgtgccctccctcagctgcaaatcggcggcatgccgcactgccgattccgccggctcctccagttatcagcgctacttttcgggaaaattctgcttccggcggggccagcgtgagtttatatagttcgagcggccaatattcgacatggtaggactcattttcatgtaaagaaacaaattgccccagagcggttgctcctttcattacggcgatggccctccgatataaagccccgcttactttagacatcgcataactttttcctgtattcaccattccgattccaggaatcaatatcacccgcggggcggattcaaagatttgatccccatcctgctgattgcgtgtaaagtaagcctgatactctgatgtaaaggtctcgactcctgacttgatcagatctgcaagcttgtgcacatcttgagtttccggattccaatcaatgtacagcggaacccgttttgtgtgaacaaggtgatccgggcatgccgcaccgatttgcgaaagtgctggcgcttggacactgtttacaaattccaagacatcgtcatgatcatcataggaaaggatcattttcttttcttcacttactgctcctctgatcacaggcatgatgcctgccaagatttgttttcttttatcctccggcagcggctgataccttttgcctccgaatacctcatgctgattgatacgatcgttaatatactgctcggcttcttgaatgatggatatcgttttttgataacatgtttcagacgtctctccccaagtgactaagccgtgtttctccattaatacaagctcggcgtgggggttgtttgctacgccttcagcgatcattttagacaaagtaaatccaggacggacgtatggcacccatacaaaccgatttccgtaaatgtcttcagcgatttgttttccattatccgcacagcatatgctgataatcgcatctggatgggtatggtcaacatgtttgtatggcagaaaagcgtgtaatagcgtttcaattgaagggcggggatgtttgctgtctatcatacaatgagacaggtagtctaccatttcttcatcgggcatttggtcccttttaatcagcgggcggatatcatctaatttcaaaccggaaaagttatgcgctttcattgttgccaaatccgatccgcttccttttacccacatgacttctatttcacggcctctaaaatccttttccgttgttttcatagatgtattccccccgccccagttgcagacagtgcggtctgacccgatcagattggacctgtacaccaattcctctacacctttaggtagctgtgcagctcgctctgaatcccatatatgtttcaccatatttgatattcctccatacccttttatttgtatccgttttcattatatatgatttctgtttgtttttgaatcgtttttgtttatttttgctttttaacaaaaaaagaaagcagcagatatgccgctttctcgtttcattatgattctattttaaatttcttcgtaatgtcctgaagttcttccgccatgtttgccaacgtttccgctgaagagctgatttcttccatggacgcaagctgttcttccgccgaagctgcgatatcctgaatgcctgctgagctttctttcgccactgcagaaatatcttcaacagcacttgacacttcctgtgatccggctgacagttgttcaaccgtcgcgttcaagttttgcaattcgccggaaatttgggttgtcatctcatagatttgtttaaagctttccgctgtttgatccgtaatctgcaagccttctttcacttcatgattcacggattggaacattgaaagtgaggtgctgatttccctgacaatctcttgaattaatccttcaatttccttggcggagtctgctgattgtacagcaagttttctaacctcttccgcaactactgagaaacctcttccgtattctcccgctcttgccgcctcaatcgcagcatttaatgcaagcaggttggtttgatcagcaatgccgttaatcacattcaagatgcttgtgatgtcttgcgattttgtttcaaggcccttcacaaccgcttccgctttttgaacggattggtcaattgttttcatctggccgactgtatgctccaccagcttttctccgctgcccgctgcctcagaggactgaatcgatgatttcgtaatggttgaagaggcttgagccacttttgaaatcccctcgttcatttgagaaagatgatttgagcttgtttccagtttctcgctttgtgcctcgttgccatctgagaactgttcgatggcaagtgtaatatgttcagttgccttgcttgtttgggctgcgcttgctgtcagctcctcagaagatgaagcgacgttttctacagacgtttgaataacgcctattacagaacgcaatgatgcagacatttcattaaagctttcgccaagctggccaaactcgtttttcgagtgaatgtcaatgacttctgtgagatctccgctgctgatttttgcagacgttgagacaagttttcttaacggcttggtgatggcacggataatatagagtatgagtatgccgccgattactattgacacgcatagaatgataaccgcagtgttcagcaccgggcttgaagcatcttgcaattcactgacaaaatatgtgcccgcgattttccagccagtcagtttatttgtcgtaaaggccattttcttttctttgccttcgaatgtatattcaaatgagccttcttttttggaatatacttggtttgtccaatcgccggaaccggttgtccccggcttaatggtcggatgggcgatatattttttgttgcctgtcgtaataaatgcaaagccttcttttccgattttgattctttttgatgcagtaagcacttcatccaggtttaaatctagcgctataacccctgaaccgtcttttaattgttttgaaattgtgacaacgatatctcctgtcgcttcatcggtatacggttctgagaaaacagcttgtcctttttccgcaaccgcctgtttgtaccagtcacgtcctgtcggatcgaaacctttcggaacaccgctatccggatatttataaagcttcttatcttctgaggcagcatagattgcgcctacatcgtcgttaagtgtcgtgtactgcttaaatttctctttcagtaatgttttgtttttgcctaacaatatgtctttatcgactgtctcactataataatctattgcttttactttatcttctaatttattttgcagcgtactgtttagttcttcaacatttcccttcgcactgcttatgagctctctgtctaacgcgttccaagctgattgataactgaaatatgctaaaaccccaaccggcaaaataagcactgccagaaacgcagcgattagcggtttgctgatcgatggctgtttgatccattgtatgaattttcccattctcgttgactcctcctttaagataaatctaatatcgtcaaactaggataaaaggtttaataaaaaaactaaaaaaaacacccaagcgcaacaagcttgggtgttaaggcttattattcaattttaaatcgtttggtcatatcccgaagctcttccgccatagaggaaagggtctctgcagacgagctgatttcttccatggaagctagctgctcttcagctgacgccgcgatatcttgtatatgcgctgagctttcttttgaaatcgatgcaatgtgctcagacgctcccgaaacttcttcggagctggcagaaagctgctgaaccgtcgcactcatattttgcagttcgccggcgatttggttcgtcatttcagaaatgcgtttgaagctcatttctgttttatctgtgatgtcaagtcctgtctgcacctcttgattgacagattggaacatgccgagtgatgtattgatttccttcacaatttcgatgattaatccttcaatctcttttgctgaatctgctgactgtactgccagttttcttacttcttccgctacaacggagaagccgcggccgtactcgcctgcgcgcgctgcttcaattgctgcgtttaaggcaagcaggttcgtctggtctgcgatgccgttgatcacacgcaaaatgtttgtaatatctttcgatttcgtttccaatccgcgtacgacttgctccgcttctttaacggacttgtcaatgacattcatttggccgacggtttgatgaacaagcttgccgccttcacttgcaatttctgtcgattgaacagatgaatcagtgatcacttcagaagcttgagccatattcgtcaacccgtcattcatttgataaatgtgctctgctgccgtttcaatgttttcgttttgtttttcattgccgttagaaaattgttcaatcgccaatgtaatgtgctctgttgccttgctcgtttgcgcagctgatgcagtcagctcctcagaggaagcggcaacattgtctaccgaatcctggatggcgtgtatgagagaacgaagtgacgacgccatattgttaaagcttttgccgagctcgcccaattcatcttttgaacggatatcaatggtttccgtcaaatctccctcgctgatccgcttagaggaaccgacaagctgtttcagcggtgttgtaatcgaccgaatgatcaatgtcatgacgataatccctatgataatagctgcggccaagacaattaaagcaaggtgaaggacaggctgggctgcctcatggatttcatccaaatacatggtgccgccgatcttccatcccgtcaacttgtttgtgtcaaaggccatttttttcttatcgccatccatggtgtattgaaaatcgcctttatcagcactcaacatcttatcgagccagtcgccttttaattcagttcctgattgttcattagggtgtgcgacaacttttttgtccttcgtcatgataaatgcgtagccttgtgtgccgatgttgacttttttggttgttttcagcagattttcaatcgtcatgttgattgcgataacgcctgaaccatcttttgtctgctgggcgattgtcacaaccatcgtatttgtcgacgcggttttataagggtctgtgatcacgactttccctttatttgcaaccgcttttttgtaccagtcgcgttcaaccggattatagccgcttggcatcggaagatccggatagcgggtaaagtgcccttttgtgtcacttgtataaatggattctacatccttgttaatgctgatatattgtgagaatttctctgcaatgcttgcattgctttttgcattgtatttctcttttgtcagccattcgctgaaataatcagcactgttttctttttcgccgatgctggtgttaatgatttcgtttaattgctgtacattttccaatgcgctccccatcatctgtctgtcgagtgagctgctagccgattgatacgcaaagatcgccaatatgacaaccggtatgatgaggatcgacagaaaggaaacgagaagcttccgtgtaattgatctttgttttatgagttggagtatttttttcatcattcatttctccttttttatgctacccttcatatcggctggaaatgggtaaatatatacagcaaaaaagaagaaatttaacaaaagtaactaatttcccataaataaatagtattttagacctattatttgtctactttaaattgttttgtcagatcacggagttcttcagacattctttcaagcgtcagtgcagatgaactaatctcctccatggatgccagctgttcctcagctgaagcggcgatatcttggatgccatccgagctttccttagaaatggcagtgatatcatttgaagctgcggaaatttcttgagctcccgctgacagctcctcaaccgtcgcattcatgttttgcagctcggaagcaatttgattggtcatttgcgatatatgtttgaagctctgtttagtttcatccgtcatgacaagccctgtttcaacttctttgtttacggactgaagcacgttcagtgatgtgtgaatttcttttactatttcactgatcagcgattcaatttcttttgctgagtcagccgactgtaccgcgagctttctcacttcctcagcgacgactgagaagccccggccgtattcacccgctctggcagcttcaatggcggcatttaaagccaaaagattggtttgatccgcaatgccgttgatgacacgcaaaatattcgtgatatcctttgatttgatctccagccctttcaccacttgttccgctgcttttacggaatggtcaattgtgttcatttggccggctgttttctggacgagtgtctcccctttgcttgacacttcggttgaatctgcggatgtttctgtaatcactgctgcagcccgcgccagctctgccaatccgtcattcatttcattaatttgttcggttgtcgtttctattttctcgctttggctttcactgccgtttgaaaattgctcgatagccatcgtaatgtgctcagtggctctgcttgtctggtctgccgatgcagtcagctcttcagacgaggaggcaacgtgttctactgagtctttgatcccgtgaatgagcgagcgaagcgagtgtgccatatgattgaagctctcactcagaacgccgagttcatcttttgaattgatttcaatcgtttcggttagatcgccttcactaattttttcagcggatgcgacaatgcgtctcaatggctttgtgatggatcgaatcacaaaataaatcgccgtcattccagctccgatggcaatcgccagaacgattgaagccatgatcagaaccctgcttgcagcatcgtgaatctcgtttgcatacatcgtgccgctgattttccagcctgttgtttggcttgttgcaaatgccatttttttctttttgcctttgtacgtatattcaaagtccccgcttttatccttgtagagcttatcaacccagtccccttttagctctgttcccgctttttctccggagtaggcgatgactttcttgttttggctcaaaataaaagcatagccttcttttccgatattgattcctttcgcggtagtgactaagtcatcaattttcatatcaatggcgacaacgcctgacccatccaccgtttgacgggcgatggtgacgaccatttttcctgatgaaatcgattcataaggctcagtgacaattgttttgcctttattggccattgcttctttgtaccaatctcgttccaaagcattaaagtcgcttggcatgtcagcgtacggataacgtgtgaagtccccgtctttgccgcttgaaaataccgcagcgacattatcattcatttggataaattgtttaaattcctgtttcagctctgttttctttttatcctgaaatttttctgctgtagcccaatcgctgaaatatgcgaggcttttttcagtagtgctgattttatcatcaatgatgtgatctaatatctgaacattttcctttgcgctttgcgtcatctgtacatcaagtgaggcaactgctgattgataagcgctaaccgaaagggcggttatcggaacaattaagatcagcaggaaagaaataataagtctccttgcaattgatgatctgcgaatagtggtgagtgtttttttcatttccttttgaaccttctttcaataatttacaaattatatcggcggatcttcctttaaattacattgaaaatggaggaaaaaatgaaaaatagttctaaattcacctgttaaactaggactttattattgtttaccatataaaaaaacagcgctttgatagcgctgtttttcggtttttactcgattttaaattgtttcgtcagatcgcgaagctcttctgccatctgcgcaagagtcgtcgctgaggaactgatttcttccatggaagcaagctgttcttcagctgatgcggcaatgtcctggatgcttgccgagctttctttcgacacgtctgcaatgccgctgactgctgctgaaacatgctgtgaacggtctgacagctgctcgacggtggaattcatcgtctgcagcttgcccgcgatttcgtttgtcatgctgaaaatgctctggaagctttcttttgtattgtctgtgacaacaagtccggactgtacttcctgattgacctctttaaacatgtgaagagaggtgtcgatttctgcgacgatttcttggatcagcttttcgatttctttcgctgaatcggctgattggacagccagcttgcgcacctcctccgctacgacagagaagccgcgtcctgactctccggcacgcgccgcttcaatggctgcatttagtgcaagcagatttgtttggtcagcgattccgttgatgactctcaaaatgcttgtgatgtcttttgattttccttctaagcctttgacaacagcttcagcctgctgaacagattgattaatcgagttcatttgtccgactgtctgctgcacaaacttctcacccgttccggcgatttccgttgattggatagatgcctttgtaatatctgacgatgtttgtgagacttgctggagtccttcattcattaagttcagctgatgagagctggattcaaccttttcgctttgctcctcgtttccgtttgagaactgctcaatcgccatcgtaatatgctcggtggctttactcgtctgcccggcagatgcggtaagctgttcggaagatgcggccacattgttcaccgagtcctgaatagcgctgatcagagagcggagagattgtcccatttcattgaagctttccccaagctctccaagctcatcctttgaatggatttcgatcgtttcggtcagatcccccctgctgatcgttttcgatgattgaacaagacgttttaacggttttgtaatcgaacgaacgataaacagaattaaaattccgcctgccacaatggaagcaatcagcacaatcattcctgttgtcagcacagactttgaggcatccttaatttcatccatatacattgtgccggctattttccaaccagtcagttcgtttgtagtataggtcatctttttatcttcgttattaagagtatactggagttcaccgctgtcattcgcatacattttggctacccagtcgcctgaaagcttttctccagccttatggttcttgtgggcgacataggttttgttttttgttgcaatgaaagcataaccttcttttccgaccttgatttgtttcatttgttctaacaatttatcaatggtaatatccatggcgacaacgccagatccgtccttcagctcctgtgcaatggtaatgaccatgcttccgtcactcgcagccacgtaaggatctgtcacgacaatttcaccgccggccttcatcgcatcctggtaccaaggccgttgtctcgggtcgtatccttccggcaatttttcttttggcgcttgtacataagtgccgttatctgcgcccccataaattctggctactccttgattaatagatacatattgtgaaaatttagctttgatctcttcttgatttgatttccctttgaatgcggatcttttaagagattcactgaaaaaggtgactgctttcgctttttctcccagatcatttgtaacagttgtattaaatgtatcgacactgtttttcgcatttcccataatttcctgatccagctttccgctggcgcttcggtaagagctaaattctaatataagaatagggataatgagaatcgcaataaatgagacgattaatttctttgaaatagacggtttcttcagccaattgataaaagtcttcatgtcacttgctccttcaggtttgatacagtatatatcggctgcttaaaaaagttttaaaataaaaaatggaagaagttctttttggctgtcttctgcctttttaactttcattgcccaagctctttgcatatcttataaaaaacaaggggggctaaacatgattattgtatcaggacaattgctccgtccccaggatattgaaaattggcagattgatcaagatctgaatccgctcttaaaagagatgattgagacgcctgttcagtttgattatcattcaattgctgaactgatgtttgagcttaaactgcggatgaatattgtagcagcggcaaagacgctgcacaaaagcggggcgaagtttgccacttttttaaaaacatacgggaatacaacgtattggagggtttcaccggagggcgccttggagctgaaatacagaatgccgccttcaaaagcgattcgggacattgcagagaacggcccgttttatgcgtttgaatgcgcaaccgcaatcgttatcatttattacttggccttaatcgatacaatcggagaagataaattcaatgccagctttgacagaattattttatatgactggcattatgagaaattgccgatatatacggaaacaggacaccactttttccttggagattgtttgtattttaagaatcctgaatttgatccgcaaaaggcgcaatggagaggcgaaaatgtgatactactgggggaagataaatattttgcccatggtcttggaatcttaaacggaaagcaaattattgataagctgaattcttttaggaaaaaaggagccttacagtcagcctaccttctgtctcaggcgaccagactggatgttccgtctcttttccgcatcgtccgctaaaaagccccatcgcctattttccggacgatggggtttcaaatgcctttcgttttcgatagaagggggctgtgccaaaatattggttcgcagcccactccattttttcaaggtcatttcttgtcacgattggatcctggctgctccatttgataaagcggacaaaatagtagcctttgataggaaccattgtaacttttgagtgaggccagccttcaaatacaaactcaattttccctctttttttataagaatattgaagaatgttcatatctgtcacctcagtttatcaagttacgttcggcaaagctcggtacgtttacatccattgattaactatccctcatgcaggctttccggaaaacaaagggtgaggcgcgtgtctctttccctcgctttttatttcgcatatggacgaatgccaagcacgccttcattcgataaagccgcagcgtgggcgggtgtgacaagccctccggctatcggcgcttgttcagcgatcatgcttttgtcataaaaaacagcctattatcccatcattttgatatagcatgtccgggtgcgaggcccgtcaaattcgcagaaataaatgccctgccacgttccaagaataagccggccgttttccacaatgacatgctgtgaagctccgaccgtactcgacttcatgtgtgcagctgtattgccctccatatggcggtccagctcatgttcccacggatatacctcatcaaaccttctgagcatatcttttttgacgtccggatcggcattttcattaattgtaatgcccgcagtcgtatgcggacagtaaatcagcgctgcgccgctcgttatacctgtttcttgaagaaacgcttccacctcccgggtgatatctatcatttcatctcgtttggttgttttgatttgcagtgttttcagcatttgtttctcctttcgtttgtccgctctcatcgcttaattcgttctgtgttcttttttttcctgttaaaccgctctcataaacccgataaaacaaaaaaactccagtctaaggctggagtttagcaccatagatatattcttgcttcatacggctttaagagtactgatgtcatatgcttgtgcggctctgtttcaatatttgacaagacgagtgcatctgatgacaatggcaatccagagtgcctgaacaacgccggtgttcctgtcagattggccgcaatcagtgcagtatggctctcgtttttccgaagatatgcaaagatttgctgatcttccggtaaaatgagctcgtatgtcccgttaataaaaacatcatatgtttggcgcagcttgatcaagcttttgtaaaaatggtaaacggatgttttatcgtttttttgcgcctcggcattcagccatttgtaattctcattgattccgatccacggtttggcctcagaaaatccggcgtatggaccagcattccattgcatcggcgttcgcgaattgtctcttccctttttccagacaatcttcatcacatcctcgtgtgatgtgcctttcgctgtttttgtttcatacaggcgtttcaatgcgacatcatcatagtcctcaatagatggaaaagccacgttcgtcatcccgagttcctgtccctgataaataaacggtgtgcctttcatgagaaaataaacagcggaaagcgcttttgcactttctttcaggtacactccgtcgtctccccacacagaaactgaacggggctggtcgtgattctccataaacaaagcattccagccgatcccttccagactgtcctgccagtcagttaaaattcgtttaaatgcaacgatatcaatactttcattgatctctacatcccacaggccgagatgctcaaattgaaaaatcatgctgaatatgccgtttttttctccagcccaatcagctgcttcttttgcagcgacgccgtttgcttcaccaactgtcataatcggatagcgggaaaatgtgttttccttcagctctgttaacaaatccataatgccgtcagcattcatatgataaggaaaggaagggacatagtccagtccctttggattcggcatgtcaggaaacccttcttttttcttaatatgcgtaatggcatccacccgaaatccgtcaattcctttatcaagccaccaattgatcatgtcataaacggcattcctcaccttttcattttcccaattcaaatcaggctgttttttatcaaaaaggtgcagataatactggcttgtcttttgatcatactcccaagccggcccgccgaaaatgctttcccaattgttgggcgtttttccgtttttgccgtctttccaaatataccagtcgcgcttttccgagtgtatggatgaacgggattctatgaaccatggatgttcgtcgcttgtgtggttcacaacgagatccataatcagcttcatatccagatcatgaatgtcaccaagcagctcatcaaaatcttccatcgtgccaaactcgcttaatatgttttgataatccctgatatcatagccattatcggcattcggtgaatcatacagcgggcaaatccatatgacgtcagcgcccagctcttttatgtaagaaagcttggttctgattccttgaatatccccgattccgtcgccatttgaatctttaaaactgcgggggtaaatttggtaaactacggcttccttccaccaagcctttttcatacagccactccttcccagtgtaccgttcttatatatcctatgtagaaaaaggtctttacagcattgctttttaagaaatgacttgatgacacaaaaaacagccgtttgttccccggctgttttttatcaaaaatcagttttttttatttctacaaaacggatgtggtgatcttcggcgtcgaggattttaaattcacagccctccgcgtgtatcacatcccctgctttcagctccattttttgcgttagaagccagcctgcaatcgtatcaatttcttcattttcaatcgcaatgtcgagaaggtcattcacttcgtctattagcgcttttccatccatcacataatggtgctcgccctttttcaggatgtgcggtgtttcatcctgatcatactcatcgcggatttccccgacgatttcctcgataatatcctctacagtgacaagccccgccgttcccccgtattcatcgacaagaatcgccatgtgaatccgctccttctgcatgcggattaaaagctgctgaacaggaatgctttcaatgactctgataacgggcctcatgatttgattcagctttatcggctggccgagaaaataagctttaaacatatctttgctgttgatgatccctaaaatatgatccttgtcatctttgatgacagggtagcgtgtataccgttcattaatgatgtgatgaattgcctcttcaagcgactgctccagagagataaccgcaatttctgtccgcggaatcataatctctctcgctacccggttgtcaaattcaaaaatcttatttacatagcggaattcagactgattgatttctcccttttcatagctttcagaaaggatcagccttagttcctcttcgctgatgacaacctgatgctcctttaccgaatgaaagccaaacaatttcacaagaaaacttgcagagccgtttaatgctttaataaacgggtacgtgattttataaaaccagatcagcggctttgcaatccataagcttacagcttcagctttttgaatagaaaccgttttcggggcaagctcccccatcaccacatgcaaaaaagtgacgatgataaatgcaactacaaatgtgacaatgtggttaaacggttccggtatgcctgtcattgtaaataagggatgaagaaaacgttcaaatgtaggttcaccaagccacccaaggccgagggctgtaatcgtaatcccgagctggcaggctgataaatactcgtcaagattggagatgattttatgtgcggctagtgctcggctgtcaccgctttcgatgagctgattgatttttgaacctctgattttgacgatcgcaaattccgctgcaacgaaaacagccgtaatgccaatcaaaacaaaaatggcgatcaattgtaaaataagcaaaaaaagcccttaccataaatggtaaggggccacctccttaacgttaattctcatcacgaccgtttaagaaaatcatcacaaaacgaagtagttcaaacagggaaaccagggcggcggccacatacgttaaggcagcagcactcagcactttatttaccccattttcttcattgtttcggatgaatccttctgacacaataatctgcttcgcacgtgaacttgcattgaattcgacaggcaatgtaatcagctggaaaaagacagccgctgaaaacagtatgatgccaagcccgatcaaattcaggctgccgagaagcatgcctcctaagaaaagcaaaggagctacaccggatgcaaaattcacgactgggaagattttatgtctcagcacaagcgcaccatatgactcctgatgctgcaaggcatgtccgacttcatgggaagctacggatatggcggaaattgagcggccgtaatagaccggctcagataaacgcaccacccgtcttgtcgggtcgtaatggtctgttaaagtgcctcttaccggttcgaccggcacgtcgtaaagaccgtttatatctaaaatccgtcttgccgtttctgcccctgtacgtccgcttgaggcttccacttttgaatatttttcaaagttgctctttactttaaattgtgcccaaaacgacaatcccaatgcggctattgttaaaaatataaacagcattttttcatcatcctttgttcatgatcatttctctattacgattattttaatgagttttctttctcgtgtacagaaatgcgctttttcttccggcttggagcacacaatccaatcagcaaaaagaacaggcctgctgaaaacaaataaaaggcgaaactgccggccagttctttcagaaaatgaagccaggagaagcttccggaaaagtgattatatgaattcaaatcgaaaataaacaaaatcaccgcggatgccgccagctgcgtaccgattaaaaccacgatcgttctttgaaagatcgtcatctttttcatcctttttgttttagtttatggagaaatccggttttatatgttttgtacattttttgaaaaacatcaccggaagtgggacatactgttagaaaaaagcacgggtgtgatggaagctatgaaagtgacgagtgaggaaaaggaacagctgagcacagcaatcgaccgaatgaatgaaggactggacgcgtttatccagctgtataatgaatcggaaattgatgaaccgcttattcagcttgatgatgatacagccgagttaatgaagcaggcccgagatatgtacggccaggaaaagctaaatgagaaattaaatacaattattaaacagattttatccatctcagtatctgaagaaggagaaaaagaatgaaatcaaatcggatatttatttcatggctcaggtggccgttatttatccgaatcggggttattattttatgtctgattcttttgttcggccaaatcatttatatacttgagcctaagcagttcacttcggtattcgaaggtatttggtgggctgtcgttacggtttctacagtcggttatggagactatgtgccgcacactccgctgggacaggcagccggaatactgctgattttgagcggagcaagctttgtcacagcgtatttcgctacgttatcagcggccgcattcagcagacagcatcgctacattgaaggaaaagttgcttacaaaggccgggaccacatcattctgatcgggtggaatgaaaaaacaaaccggcttttgaaggaccttcagcttgccgccccttccaaaacagtcgtactaatcgatgaatccttaacagaaggcccgcttattgaaaacgttcatttcatacgcgggcacgctgccgatgatgggacactgaaacgggccaatattactgaagcggaatcagtgatgattactgccgatcagtataaaagtgaaactgatgctgatatgctgtcagtgctgactcttttatctgttaaaggtcttaatccccttgcttactgcatcgtcgagattttaactgaccgttttgtcaccaatgcggaacgggcaggcgcaaaccaaatcatcggaacttcagaatttatcagccgggcgatgctgcagcattaccaagtcaagttacggccgtctaaacagcagaacggaatcaagctgacacttgatcagcatgtggagcttcttgctgttcctgacgaactaaagggagcggcttacaaaacctgtgttctctatttccttgatcacaacacaacaattataggcatacaaaaaaaggaggggccgatgctttcccctcctcttacatacaaggtgctcgaaacagatcaattccttgccatctagtgtaacagaacatcctccaattctttcacgagagaggcgccgatatccaaaaatgccggatcaatttccgcgtcccgcctttccggttcggaaaattgattaaacagtgattggaaaggccctccctcggcgtgatcgtcaacatccgcctgaaacacctgtctcagcataaatggcgttccgatccggacggccgcccctcgttcatcgagactgccctgtaccgcattgacgggaattcttaaaaataaatagccgtctctatcatcaattttataatcaaagtagccatgatcgtattcccagccgccgtttatcacataaccgagcggcttcatcacttgttccagttcttgaagcagaaaagactgcccatctatcgcggaaggtattggtatcatcagaatgccccttttttcacttatcctgtcccgccgaacaagacttcattcagaggcgcctacatggaaatcgttgtttctttcgcgcggccaacaggaaagaaagcgcattcaattaagaagtaaacagccattgccgctgcaagccatacagctgaatcccaagacacataaacaaccgttgcatagagtcctaatttagtgaaaagagtatgggttcgttttaaatgcaaaatccgatgtaccgcatcggtaaaaagggcaagcggcaaaccaatgagaagaaaggagtggatgaaaaaatgtgacagcgtgccgccaaagcttgaagaaaaccctgtatacacggcatcaaaggagataaggaaacttaaaatagctgcagaaaaaccggcaatgatgagatgtttaaccaattgtttcatgaacatcagcacctttctgattttataaaaagccgaccggcaaatgccagtcagctttctcacattaatcttccagacgtttttcaagctctgcttttttctcttcaaagccaggtttgccgagtaacgcaaacatattgactttatacgcttctacaccaggctggtcaaacggattgacgccaaggaggtaaccgctcatcgcgcaggctttttcgaagaaatatacaaggtatccaaaagtatatgcattcagctcaggaatgttaacgattaagttcggaacatttccgtctgtatgggcaagcattgtaccttggaatgcttttttgttaacgaaatcaacagttttaccggctaaatagttcaagccgtcaagatcgttatccgcttcctcaattgtcagttcatgtttaggcttctctacgttcaggaccgtttcgaataaatctctgcggccttcttgtacatactggcctaaagaatgaaggtctgttgaatagttcgctgaagaaggataaatgcccttctcatctttcccttcgctttctccgaacagctgcttccaccattccgcaaagtattgaagcgccggttcgtagttgatgagcatttcaattgttttgcccttattataaaggacattgcgaacaaccgcatattggtatgctgggttatcttccagttcagatgttgcaaaatctttgctcgcatccagggcgcctttcatcatgtcgtcaatgttgacgccgctgacagcaatcggcaagagacctacagctgttaaaactgaataacggccgccgacatcgtcaggaattacgaatgattcaaagccttcttcgttagaaagcgtttttaatgcgccgcgctctttatcagttgttgcataaatccgcgctttcgcttcttctttaccgtatttctcttcaagaagcttgcggaaaatacggaaagcgattgcaggttcagttgtcgtacctgatttagaaatcacattaatagagaagtcaacatcttcaagaagatccatgacgtctctcatataagatgaactgatgttgttcccgataaaaatgacttgcggattgccgcgttttgcttttggcaaagtgttataaaacgcgtgattcagcgcttcaatcgctgcccgcgctccaagataagaaccgccgatgccgacaacaagcaagacatcagagtcagatttgattttttccgcgctttttttgatgcgcgcgaattcttctttatcataatgttcagggaggtccacccagcctagaaaatcgctgcccgcgcctgttttctcatggatattatggtgtgctgtttttacaaagtcccgcaggtatgtaagttcatgttcgttgaagaaagtcaacgcttttgagtagtcaaagcgtacatgcgtcattgcttgtccctccataacggtataatgttttcatctttcactttatatgaacttatctgtgaaatcaagtcaagaagaaagggcggaatgactggattccgccctttgggtttatagagacgcgcgaaggatggcaagcacgtcatctttgttcagtttttggaagttgccgaagccgccgtgttccatttccttggctgcgatatcagcaatcagctcaagcttttcttctccaatattgtaatcagcaagacgagaaggtgcaccgaggcttgtccagaacgcagacagtttatcgattccttcaagcgcaatttctttatctgttttgccttcagtatcaatgtcaaacatgttgagcataaggtttttaaaacggcctacatttgtatcaagcgtgtatctcatccaatttgggaacagtattgccaaaccgcccgcgtgcggaatatcatatacagctgaaacagcgtgttccattgtatgagaagcccagtcaccgaagtatcccatttggagcgtgccgtttaaagcaatagtaccagcatacaaaatcgtttcacgaagttcgtagttttccagatcttcaagaagcttaggagctgtttcgatgaccgtctgcaaaacagcaaagcacattctatcctgaagcggcgtgttttcaacattatggaagtattgttcgaatacgtggctcatcatgtcaaccatgccgtatactgtttgattttctggaacggtgaacgtattttcagggtctaaaatagagaaacgcggatgagtgacattgctgccccatacaaatttctcgtttgtttcccagtttgtaatcacggaatcagggttcatttcagaccctgttgcagcaagagttaaaacagtgccaaacggcagcgcatcctccgctgttacttttttgctgaaaatatcccaagcgtcaccgtcatatttgacgccagctgcgattgcctttgtacagtcaatcacactgcctccgccgacagcaagcagaaaatcaatgtcatgctctctgcaaagtcctatgcctttttccactgtcgcaagacgcgggtttggctctacacctgacagctcatgaacaacagcgccctcttcttttaaaatgcctgtgacttgatcataaaggccgttgcgtttaatgctgccgcccccgtaaacaagcagtacattcttgccgtatcgtttgaattcttttcttaattgttcaagctgaccttttccaaaaatcagctttgtcggattataataagtgaaattttccatagtaaaacctccaaatgatgctggtaaaaaacagattttccattgtaacataagttgacaaaaaagaaaaagggaagcagccaaacggctatttcccctttttttatagtgatgctttcaaaattgacagcacatcttctttgttgagtgatttaaattggccgaatgtaccgttagccattgccttgtcagcgattgtgtcaagctgctcatcattaatatcataatcagcaagacggttcggagcgccaagacttgtccagaatgcggacagcttatcgataccttcaagggcaatttcttcatccgttttacctgcttcttcaacatcaaacacgcgaactgcaagctgtttcatgcgggcagggttttcagacaatgtgtgtctcatccaattcgggaacagaatcgccagtccgccggcatgcggaatatcataaacggctgatactgcatgttcaatattatgagtagcccaatcccctcttgcccccatagaaagcatgccgtttaatgcgattgttcctgtgtacaggatcgtctcacgcaattcgtaattttcgagatcattgatcagcttaggcgctgtttcaatgactgtacgcaaaagtgattcacacatgcggtcctgatacggcgtgtttgatacatgatggaagtattgttcgaatacgtggctcatcatgtcaaccatcccgtagatcgtgtggtttttaggtacggtgaatgtattcaccggatcaagaatcgagaatttagggaatacgagcgggctgccccagccgtatttttcttttgtttcccagtttgtaataacagatcctgagttcatttctgaaccagttgcagcgagagtcaataccgttccgaatggcaaagcatcttttggctgatgctttttcgtaacgatatcccacgcatcaccatcatacttcgctcctgcggcaatcgcttttgtacagtcgattacgcttccgcctccgacagccagcaagaaatcaatgttttgttctttacagatggcaacacctttattaacagtcgacacacgaggattcggttccacacctgctaattcatgcacggtcgctccggctttattcagctgttcaatcacttgatcatacaggccgctgcgtttaatgctgccgcctccgtacacaagcaatacgttttttccgtaaggtttgagttcctccggaagtctttccacttcgccgcgcccgaaaattaatttggtcggattccagtatgtaaagttttgcatgacatctcctccttagattttttattatgcagaatgtcctcaccacatgtaaagcaatcagctctcaccgatcagcataccagatggttttattttgcaaggtgctgggaaagaagctgatataagcgagggcaggccagcttccctcatatggagaatgcatgtatagattctccaatatgtcacaatctataactgttttaataattcatggaggaggttgcaaaacatgagtaccattcaaagaatttgtcttgtattaaccatcattggcgccattaactggggactgatcggatttttccaatttgacttagtagcggctatcttcggcggccaagggtcagctctttcccgaatcatttacggacttgtcggaatcgccggcttaatcaacctcggtctgctatttaagccaaacgaggaaagatcacgtgaagaagcagcaaatcctgaaatgcgataggatatcaatcacgctgaaataggattttgcatgaaatcaaaagcaccgaacattcctgtccggtgcttttttcatgcttattttttgataaggtctttgcggttggacatttcgatccactcttcaagcttatcttttaatgtgttgaaaccttgtggtgtagaagcttcttcgcttacttgagcagctttaggttttcttggtttgctttcttttttctcaggcgcagcttgtgtcgcacgaattgaaaggctgattttgcctttttcttcatcaacagcaagtacttttacttgtacttcgtcgccaactgaaaggtgctcgttgatatcttttacgaaaccgtgagtcacttcagaaatgtgtactaaaccttgagtttcttcatctaatgcaacaaacgcaccatacgcttgtaatcctgtaactttaccagtgtaaacactgcccacttcaaattttgctgccattcataacaactcctaagttaaattaaatatctgtttatacgcaatttaaaattatatcacacatgtcttatttccgcaaagaaaacttttttataaaaaatcaggtttatgcacagcaaaaagggggtaaactgaaaataccaaaggctttctagtattccccccttttattggatgcgaacaaaaggttcgtatctttttttatgttgttttgtgcaggaagcgtttcattctgactaacgcttcttgaagctgttcaatcgaggttgcgtatgaacaacggatatatccctcaccgctcggaccaaacacacttccaggaacaactgccactttttcctgcgtcagtagctcctcggcaaactgttctgaactcattcccatgcttttgatagatggaaaagcatagaaagcgccgcccggatgatgacagctgagaccgatttcattgagcgattctacaaacagattccgtcttcttcgatagctttttttcattttttctacgtcttccatgccgttcttcaggccttcaagggcggcaaactgcgccattgcgggcgcgcacatcatcgcatactgatgaattttaagcatggcatcccgaagcaaggatggtgccgcggcaaaaccgagcctccagcccgtcattgcaaatgcttttgaaaagcctgagatgactaccgtccgttccttcattcccggtaatgccgctatacttgtaaattcctcatcatatgtcagctccgcgtagatctcgtcggctaagacgatgacatcatgttttttggcaaactcagcaatctcattcagctcttccttcgaataaaccgaacctgtcggattcgatggtgagcagatgagaatggcctttgttttttcagtgactgccgcttcaaaatcagcagccgttgctttaaatcctttgtctgccgttgtatgaacgtgaaccgggataccgcctgccaaagaaacaagcgcatcgtacgcaacaaaacacggctcaggaatgatgacttcctcacctggattcacaatggcgcggatcgcaatatccaaagcctgacttgcccccactgtcacaatcagctcattatctggcgagtagctaaggtcaaacctgttgctcaaataacggctgatttcctcccgcaatgagtataaacccgcattggccgtgtatgacgtatatccttgttcaagagagagaatgcttgcttcgcggacattccatgcggtaacaaaatcaggctcgccgacgcctaaagaaatgacgccttccatcgttgccgccaaatcaaagaatttgcggatgccggatggttttatttgttgtacatagtctgataaatacgaagtcatttacggtgacaccacgattcttttgtcgtcgtctcctgtttcaaacactttgccgtcatgcttgtattttttcaggataaaatgggttgtcgtagatacaactgaatcaagcgttgagagtttatccgaaacaaaacgcgctacgtcagacatcgaattgccgcgaatcacgacagacaaatcgtatacgcctgacatcaggtaaactgattcaacctcttggaatcggtaaatccgttccgccacttcatcaaaaccgacgccccgcttcggcgttactttgacgtcaatcatggccgtaacgccctcatgtccgtcgacttttcgccagtcaatcatagcggaataatcgataataaccttttctttctccagtttgtcaataattgttttcacttcatttacagggatgcccgccatctttgcgattgtttctaaatcggcgcggctgttttcgtctaaaatttctaatatttctgtttctttttctgtcaatttcatttgattcacacctttgcaatgtcaagaaatctcatgacattatatcacgttttttgacgaatgctaagaaaaaacgaggagaaacttccgctagaattgacaatttcagggcataatacaaccatcaaaaaaagggagtgacacagaatggaggcggtttcaccaataaggcggtttacggtcgatggagtcaatgtatactacgaacattatcaaaatcccggcaggcaaacgctggtctgcgtacacggttttttatcatctgcattcagcttcagaaaagtaattcctctccttcgggacaagtacgacatcatcgcgcttgatttgcctcctttcggccaatctgaaaaatcaagaacgtttatctatacctatcaaaaccttgctaagcttgtcattgggattttggagcacttgcaagtgaaacaggctgtgcttgtcgggcattctatgggcgggcagatatcgctgtctgctgctctccaaaaacctgagcttttttcaaaggttgtgctgctttgcagttcagggtatttaaaacgttcacacccgacgattattttcgggacccatatcccgtattttcatctttacatcaaacgctggctctcgaaagaaggcgtgatgaaaaatttattaaatgtggtgcatgacaaatcgctgattgatgaggagatgattgacggctatggcagaccgtttcaggacgagcagattttcaaagccatgacaaggtttatccgccacagagaaggagatttagaacccgagcaattgaagaaaatgaacaagcctgctctattgatttggggcgaggaggatcgaattgtcccaatggagatcggtaaacggctgcacgcagatttgcctaattccgtgctgtactcacttggccagaccggacatctggtgcctgaagaacggcctgaacttatttctgaacacattgctgattttatcaaataacaaaaaaaccggtgctgaaccggtttttttaaggcgtgcaggagctgctgtttttaatgaataaaagctggccagccacttcccggcagctggcgatcggcagcgtttgttcaaaagaagtttcaaatatttgctgaatgcttttcgccagcaagtcgggatcgttttcatcatagactgcctgcacgacatcaacagcctccgtttcgtaaaactcttctccatatttaaacgggtcccatttggcaatgatcttaatcatttccctgaccgcatgactttcttccatattcatcaccgcttataataaaatttgcagttctatcttatcatagtgaagcttagaagaataaacatacatgagggggtaacagaatgaactttgataaacgagaagaacgccttggcacccaatcggtcaaatgggataaaacaggcgaattatttggcgtgacagacgccctcccgatgtgggtggcagatatggattttcgcgccccggaagcgataactgaagcgttaaaagagcgtcttgaccacggtatttttggttatacaactccagatcaaaaaacgaaggatgctgtgtgcggatggatgcaaaacaggcacggctggaaggtaaatccggaaagcatcacattcagccccggcgttgtaacagctttgagcatggcggtacaagcttttacggagccgggcgatcaagtagttgttcagcctccagtttatacgcctttttaccatatggtggagaaaaacggccggcacattttacataatccgctgctagaaaaagacggcgcatatgcaatcgattttgaagatttggagacaaagcttagtgacccaagcgttacattgtttattttatgcaatcctcataacccttctgggcgttcatggagccgggaagatttactgaagctaggcgaattgtgccttgagcatggcgtcacagttgtatcggatgaaatccattccgatttaatgctgtacggacataaacacacgccgttcgcttcgctctctgacgatttcgctgatatttccgtgacatgtgctgctccaagcaaaacatttaatatcgccggattgcaggcttcagcgatcattattccggatcgcctgaagcgcgccaagttttccgcaagccttcagcgaaatggtttaggcggactgaacgcgtttgccgtcactgcaatcgaagccgcgtattcaaaaggcggaccgtggcttgatgaattgatcacttacattgagaaaaacatgaacgaagcggaagcctttttgagcaccgagctgccaaaggtcaaaatgatgaagccggatgcatcatacttgatttggctcgacttcagcgcttacggcttgtccgatgcagagcttcagcaaagaatgctaaaaaaaggaaaagttattttagagcccgggacgaaatacgggcctggcggagaaggatttatgcgcctgaacgccggatgctctcttgcaaccctgcaggacggcctgcgccgcatcaaagccgcattatcgtaaatatagctgtaaacgcctttacgtcttcatttgtaaaggcgttcttaataaaggaattttatattttacttctaatatttagtgttataatagattcatattttatacgaaaggatttcacacgaatggaaattctaaaagactatcttctgcacatctgctttattttgtttcctattcttctttaccaagtgttttggcttggaaaacctgcgattcttgtgccaaaaataaacagcggtttggtcacgctcttcgcctgcggcgcctccgttttatgcattattttcccgattcatgaaatggactacatacaatacggccttcagatgattcccgttatcatttgtttattttacattagtaccgcttccggacttacagtcgccgcatctgtcctatgttttgaactgcttttttacgaaccttccgcaatgtttgttttcactttgctgccttttcttatcattatcccaatcttatttcagaaaaaatggccattcatgtccaaagcgaaaaaactgctgctgtctttattgatcagctgcgtggagattttcctatttttcgcctcaagctggattctttccgccttgaatattttaaattttcaaaaatcaggaattttcgtttacgaggcggcagtctcagggcttttccgctccagtgttcttctattaagcatctatattatcgaaagcatcgccgaaaatatcgccctgcgttcacagcttatccattctgaaaaaatgacgattgtgagtgaactggcagcgagcgtcgcccatgaggtcaggaatccgctgacagttgtccgcgggtttgtccagctgctttttaatgacgaaaccctacaaaacaagtcgagtgcggattacaaaaagcttgtactgtcagagcttgaccgggcgcaaggcattatcacaaactatctcgatatggccaaacagcaattatacgaaaaagaggtttttgacctatctgcccttatcaaagagacaagctcccttatggtgtcgtacgccaattacaagtcagtaaccgtcgaggctgaaacagaaccggaccttttgatatacggagacgcaacaaagctgaagcaggctgtcatcaacctgatgaaaaacagtattgaagcggttcctcacgggaaggggatgatccacatatcagccaaaagaaacggccatacgatcatgattaacatcacagacaatggggtcgggatgacagaccatcaaatgcaaaaactcggcgaaccttattattccttaaaaacgaacggaacgggactcggcctcaccgtaaccttttccattattgaacatcatcacgggaccatttcatttaacagcagcttccaaaaaggcactacggtgaccattaagcttcccgctgatcttcctcactagcaaatcgattggaactttaatagaataaatgcgaggtgatgacagatgagcacgtttgagacaggctctatcgttaaaggattttacaaaacaggtgtatacataggagaaatcacggcttgcaggccgcagcattatttagtgaaagtgaaagcggttcttacccatcccgctcagggagaccttcatcatccaaaacaggcggatgtgccattttttcatgagagaaaagcgctcgcatatggtgaacagaccaatatcccccaccatatggtgaagccttatgacggtgaagtgccggattataccgaatctctgcgggaggcgacagcacagatgagagccaaattgaatgaggatggttcggagtgggcaaagcgctcccttcataatctggacattttagaaaaagaatattttaaccggccataacccagtctgacaaaagattgggttttttacgtcgcgcgcttcaacagttcggttaaatcgattctctcgccgattgtgggcggttttggcttttcgagatactgcttatcctgctcaacaagcttaaaaagtttatatgctgtgagagcatcatcaagcgctttatgatgggtgccggttccggaatctccatactcttcggcagctttccataaacccgtcaatgtccggtctccaaaaaagtttttgtattcaagcgataaatctctcatttctcccttaaacgggaaagggatatggttaaacatacagttttgcttcagcactttcatatccatgtttccccacgtaataattgtgctgtttttctcaggatccagctcgtttagtttacggatgaaatcctcgaatctcattccttcgtctacctgtttttgggttatttttaaaaatgatttgcagcgtttcgtaagcttcgggaactttttcggtctaacatagctagaaaacgtctcaaccacttcatcatcaatcgactttacaattccggcttcaatgatttccgggaagaagttttgaggactgtactttccatcaggcattgtaaattcgaaatcaataatgagtaagctgtttgtcgtcaccttttacacctgcctttcctccgatcagaaaatgctatctttatagtatatcaattccccttctcgacatttcttcattttctaaaaataatgaattttcccagccgcttcgtttcttttaaattgtgaatcgtttctttataattagtaaggaacccgaaataataagaaggtgatgttatttctatccgtaagaaaaactttgtcattgtgtggctggcgaacttttttgtctccgctagcacaacgatgatcgttccttttctctccttatacattgagacgctcagctctttttcaaacggctttgtgcaaaggtggagcggctatgtgttcggcattacatttctcatggcgtttttggtatccccgttttggggacggttcggagacaaacgcggatacaagaaaatccttatggcaaccggaacaggcattgccctcagcattttcttcatgggctttgttacatcggtgtaccaattgttttttctgcgtatggcaatgggtcttgtaaccggattcatcccgacatctcttgcgatgatttcggcacagactccgaagagctcagctggcaaaacactcggcacgctgcaaatggggcaagtgtccggaagcttgttcggcccgcttttgggaggcatgcttgctgatcgtttcggctttacgtataccttttttatcacatcctttgtgattttctcgtctgttcttctcgtgttatttggtgtcaaagaaaagcatcttgcagagaaaacagccaaacgtacgtcttactcgagaaaagaagtgctctcctatatttttcaccatccggcgctgtgggtcatgatgctgttaaccatgctgattcaaacaggcaatttcagtatccagcccctgctcgctttatatgtaaatgagctgcacggacctgtcaatcttgcctttttctccggcatggcattttcagcaacggggctcggaagtttgctgctggctagaaaatggggtgatctgggcgaccgctacggccaccgccgcattttaatcggacttttgctcgccgcctctttcttttttattccgcaggcgctcgcgtcctcactcagcgtgctccttgttttcagatttttattcggaatggcgatgggcggtttgctgccatgcattacggcagcgatccgcgttcaggctcccggcagcattcaaggtgaagttctcggctacaatgtcagctttcgctttttaggaaacgtgctcgggcctctgctcggcggaatcatatcgagccattttaccatttcggccaccttttacgtcacggcgtttctctttttcgccggcgcctgcatgctttggatcatgcagaaacttcggaaagattcttatgccaaagcaagctgattccgagaaaaaactaaggaatcttctaaatttaaccttctcgtaatctcaaaagaatggtacgatatggctagaatttaggagaaaagagagtgaccatgttacgaaaaataatcggatggattttgctcctttgcataatcccattgtttgcatttacagttatcgcttccggaaaagaagtaaaacaaatgaagtccctggatcaggtgcttgataaaaatattgatctgaaagatatcagccttgttcagaacagctacatgtatgacagggacggctcccttgtctcggaaatcgtcagcgaccacgaaaaccgtgtgctcgttccatttaacaagattcccgaggaagtcaaacagattttcttaacatctgaggaccgccatttttacgagcataaaggctttgactttatgggaatggtgcgggctactgcttctaacgtaaaagacaagaaaattgaccagggtgccagcaccatcacacagcagctttcaagaaacttgtatttgagccacgaacgctccttcagccgcaagctgacagagctcgcgtattcctatcagctggagaaaaaatatacgaaaaatgaaattcttgaagcttacttaaataccatttatttcaacaacggtgtttacggcgtcggttcagcagctcaattctatttcagcaaaccgctgaaatctctcacagtgggagaaatggcttttatctgtgctatacctaataaccctacattatatgatcctctcaagcattttgactacacgaaaagccgtcaagaacgtttacttaaagggctaaaagatgccggggtcattacggacaaagagctgaaaaaagccgtaaaacaaaaaatcaaactggatgttgaaaaaagagaagacaaatatcctgactacgtttcctacgtcaatgatgaattcactcagctggtgtctgaatcagaaggctttgataaacgccttcaaaaagcatcaggaaaacaaaaagaaaagatcgagaacgagctgtccgcaagagtcagcacgctgatgaaagacggagtgaaaatttatactgcacttgatccgtacatgcaaaatcaagttgtggcacaaatgaattccaagctcccgtatgcggacgtacagggcggagcggctgtgattaatcaccagacgcatcaaatcattgctctatccggcgggaaaaactatcaaaaatatgactttaaccgcgcctaccaggcgtacaggcagccgggttcatccattaagccgcttcttgattacggcccttatattgaacagaccggcgcgacaacaagcagcaccattgatgccagcaagttttgcagcaaagactactgtccgcaaaactacaataaccgcacttacggcacagtgacgcttgatacggcgtttaaaaattcatataataccccggctattagaatgctcgaccgcgtcggcatccaaaaggcattcagttatattgagccgtatcattttgccaaacttgtcgacagtgactatcttcttccggcggcgcttggcggatttacaaacggcatgacgcctcttgagatgacaaaggcttatacgacattcggaaacagcggaagctatacgccgagccatgcgattacaaaggtgacagaccttaaaggaaaaacactttataaatggaatgataaagcgactcaaatattcagcgtccgcacgaacatgcagctgaaaaaactgatgtcttccgttgtgaaaagcggaacagggaaaaaagcatatttcaatgcgccttacatcggcggtaaaaccggaacatcaaatgattatcacgatatgtggtttgtcggcctgactgatacgtatacaatgggtgtctgggtcggaaaggatacaccgaccagcgttgaatatcttcacagcatcagccctcagctttccatctggaaaggaacgctgcaagcggcttattaaaggatcggaggggatatggagtgacttcagaacaaattccaaatcgcgttttgctgtttgacggtgtctgcaatttatgcaatggcgccgtgcagtttatcattaaacgtgatccggacggattgatttctttcacatcgctgcagtcggaaacaggacagagcctgctgaaaaaaagcgggcttccgactgatcggtttgacagctttgtctttattgaagacggccaagtgtacacaaagtcaactgcagccattaaggttttcaggcatctgcgaggcccatggcggctcttcgtcctttttttcgcagtgccgaagcctgtcagagatatggtctattctttcattgccaaaaaccgctataagtggtttggcaaaaaaaatgaatgtatgctcccctccccttccattaaaaaaagatttttaccgtaaataaaaaatggctaggaagctagccatcacagattgttgacaaaatcctaaaacggcttcgttttaggattttgtcatctattcagcgtgattgaaaacttttgaagttgtgaaacggcggaaacctgagaatctagccgccgtttcattgcgtacagagcacgaagcgcaaatctgaccaccaaacgctgaaatggctagcttacacaggtaagctagccattatgctattataaagcttgataaatatgaacagaataccgataacaaaggtaaaccaaaacagcagttccaatagaatgaatccaactaatgacatgagagaaagcgtcgaataaatccggtatacggtaaacacaaagtaagcgagcgtgacgaccgcaaaccagatcacaatccaaatgacattttgcaagagcacaaaggataaaatcccgccgcccaaataaatcatggaacccattctgagttttttcaggttgttcccttccggatcattagcaaaaaacagcaatgacagctcggtcacggtatttgcaattaatttcagagcggacagaaccataaaatataaaagtgcaaaggcagcaaataacgcaagcctgattcctttctctgaaaaataatcgagcattccatcatacattccaaatgaagacagcatcttcaacgcataaagtgaagttgagatggataaggacgaactaaaaagcaggatcgcaatcagcggaaaatatcctgtcaaataagtatttttcatataaaaaagtccctttctataatctacctcatttattatggaggacttaaaacacattgacaagataaattattccattttttctcctttttacgaattacgggcccaaatcttcacaaagcagcattttgagagtaaagtagtacgcaggaatcataaaacgtaaggaagttttatatgaaaaaaacattaaaactgcaaaccagactcaccatatttgtttgtatcgttgtattaatcgcattgctcattacgttttttacagtcggtgcccaaaccaccaaacgaattagagatcaggaaaaggccactgcgctgcagactgctgaaatggtagctgaagcgccgatgacagccgctgctttagaaagcggaaaaaaacaaaaggaactgcagagctacacaaagcgggttcagaaaattaccggcacggaatttgttgtcgtcatggatatgaacggtatccgcaaaactcatcctgacccgagcaaaatcggaaaaaaattcagaggcggtgatgagtccgaggtattaaaagggcatgtccatatcagcacagcctctggcacgctcgggaaatcgcagagagcgttcgtccctgtctacgcggagaatggaaaacaggtcggtgcagtcgcggtcggcatcaccgtaaatgaaattgatgaagtgatcagccatagcttacggccgctttactttattatttgcgtcagcatcttcgtcggtgtgatcggagccgttatcgtcgcccgtacagtgaaaaatatcatgtacggacttgaaccttatgaaattgcgactctgcttgaagaacggagcgcgatgctggaatcgacgaaggaaggaatactcgctgtcgatgaacatggcaaaattaaacttgccaacgcggaagcaaaacgcctattcgtcaaaatgggcatcaacacaaatcccattgatcaggatgtagatgacatcttgccgaaaagccgcttgaaaaaggtcattgagacaaaaaaacctcttcaagacagagacgtccgcattaacgggctggagcttgtgtttaatgaagttcctatccagctgaaaggacaaactgtcggagcgattgcaacattccgcgacaagaccgaggtaaaacatttagctgaacagctttccggtgttaaaatgtatgcaaacgcactgagagcgcagtctcatgaatttatgaacaaactgcatgtgatattaggtctcgtccagctgaaagagtatgatgatcttggagattatattaaagatatagccatacagcaaaaatcagaaacaagtgaaattataaatgatgtcaaaagctccgtactggccggttttctgcttggaaagcaaagctttatacgtgagcagggcgcaaatcttgatattgaatgcaacggtgtcatcccgaacgcggcagacccttctgtcatccatgaacttattacaatcatcggaaatctcatcaacaatggcttagatgccgttgccgatatgccgaaaaaacaaatcaccatgtccatgcgcttccataacagcatacttgatattgaaattaccgatactggagcaggcatgtctgaagaagaccaagccaaagtatttgaacaaggctattcaacaaagggcaaaaaccggggattcggcctttatttcacacagcaaagcatcgaaaatttaaaaggccaaatgatcctcacaagcgaaaagaatgaaggaacgacattcagtattcgcatcccgtacgaaccgaaggaggaaaatcatgattaatgtactaatagttgaagatgaccccatggtgggtgaattaaataaacgatacttaagccaaatagatggctttcagctgaaaggcatcgcttcttcctttcaaagcgctctgcatattttaggggagcaccatattgacctcattttgcttgatatttatatgccgggaaaaaacgggctggaactgctgacggaattgagagcccaaaatgaagcggttgacgtgattgtcatctcagcggccagcgagcttgacgtgatcaagaaaacacttcggtacggagctgttgattatttaatcaaaccgtttgaatttgaacgattccaaacggctctgtctgattacagacgaaaacaaaaggtgtattcaacccatcgcaacatgagccaaaaagaactggacgccgagctttttcaaaagaaagaagcaacagaaaaagtgcagcttcctaaaggcctgacaaaaagcacgctgaagctgatctggtccagtatccagtcatttgaaaatgaatcttttacgacagaagacttggcaaagcacacagaaatctctcaagtatccatacgaaaatacttaaagtttcttgaagatatacaggttctgaatgtagaaatggcgtacggaacgatcggaagacctgtgtttcagtacaacgtcaacaacagtaacattaacggaataaagcaatatctataagaaaacgcactgcttgctttgagcagtgcgtttttctgtcatatctcttgccaagatgcttgattctattgttgataagttatacaagaataacaaagggctttcacatttttaagcaaataattctaaaaatagataatttttaaaaaattatgcgaaattctatttatttcttattagttaaatgataaattatgattggttagttgatcccgaaaaactaagtcataagtcttacttcagaaaacgatgtcacggttttccgcccggaacgccttccgcatccttctcttccccgcctttcgaaggaaatactcacaccacgcttattcagggaagaatagaactgtctcagcgcattccatttgttattatcagaaaattttatcgattctaagaaattgttcaggacagcccatcacatgactggccggatcagctttgaaccaaatttttctgggggttatatcttgaataaacgaaaaatcggattggcgatgtcacttgtgatcgcagcaggcaccatattaggagcatgcggaaacagcgaaaaaagcagcggctcaggcgaaggcaaaaacaaattcagtgtggcgatggttactgacgtaggcggagtggatgacaaatccttcaaccaatcagcctgggaaggcatccaagcctttgggaaagagaatgggctgaaaaaaggcaaaaacggttacgactatcttcaatccaaatctgatgcagactatacaacgaacttaaataaattggcgcgtgagaattttgacttaatttacggcgtcggctacttaatggaggattcaatcagcgaaattgctgaccagcgtaaaaatacaaactttgcgattatagatgctgttgtcgataaagacaacgtcgcaagtattacgtttaaagagcaggaaggctcatttctcgtcggagtggccgcagccctatcaagcaaatcaggaaaaatcggctttgtaggcggcatggaatcagagttgatcaaaaaattcgaggtcggcttccgtgccggcgtgcaagcagttaaccctaaagccgttgtagaagtgaaatacgcagggggtttcgataaagccgatgtcggtaaagcaaccgccgaaagcatgtataaatcaggcgtagatgttatttatcactctgcgggcgccactggcacaggcgtctttactgaagcgaaaaacctgaaaaaagaagatccaaaacgcgatgtctgggtcatcggtgtcgataaagaccaatacgcagaaggccaggtagaaggaacagatgataacgtcaccctcacttccatggtgaaaaaagtagatacagtcgttgaagatgtaacgaaaaaagcgagtgacggaaagttcccgggcggcgaaacacttacctacgggcttgatcaagacggagtcggcatttctccatctaaacaaaatctatcggatgatgtgatcaaagcggtcgataaatggaagaaaaaaatcatcgacggattggaaatcccggcaactgagaaagagctgaaaaccttcaaagctgaataagaatcgcagggataaggaggtcgagcccttatcccttgtttttcttttattttgaaataaaggagcggtcaatcaatggaatatgtcattgaaatgctcaatatccgcaaggcgtttccaggtatcgtcgccaatgacaatatcaatcttcaagtcaaaaaaggcgaaatacacgcgttgctcggtgaaaacggagcggggaaatcaacattgatgaatgtccttttcgggctgtatcagccggagcggggtgaaattcgggtgcgcggcgagaaggtgcacatcaacagcccgaacaaagcgaatgaccttggaattggaatggtgcaccagcactttatgcttgttgacacctttacagttgctgaaaatattattctcgggaaggagccaaagaagtttggcagaattgaccggaagcgtgctggccaagaggtgcaggacatttccgatcgatacggcctgcagatccatcctgaagcaaaagcagctgacatatcagtcggtatgcagcagcgcgcagaaatattaaaaaccctctaccgcggtgccgacattctgatttttgatgaaccgacggctgttttgacgcctcatgaaattaaggaactgatgcaaattatgaagaacctggtcaaagaagggaagtccatcatcttaatcacccataagctgaaagagattatggagatttgtgaccgcgttacggttatccgtaaaggaaaaggcatcaaaacccttgatgtccgtgatacaaaccaagacgaactcgccagtctaatggtcggccgtgaggtatcgttcaaaactgaaaagagagctgctcagccgggagcggaagtgcttgcgattgacggcataactgtaaaggatacccgcggaatagagacagtcagagatttgtctctttctgtcaaagcgggagaaatagtcggcatagcaggcgtcgacggaaacgggcaatctgagctgatcgaagcggtgacaggactccgcaaaacagattcaggaacaatcaccttaaacggaaaacagatccaaaacctgacgccaagaaaaatcactgaatccgggatcgggcatattcctcaggatcgccataaacacggtctcgtccttgattttccaatcggagagaatatcctgctgcaaagctattacaaaaagccgtattcagcattgggcgttttacataaaggcgaaatgtacaaaaaagcacgcagcctgatcactgagtacgatgtcagaacgccggatgaatatacacacgctcgggcattgtcaggcggaaaccagcaaaaagcgattatcgggcgggaaatagaccgaaatcctgatttattaattgccgcccagccgactcgcggccttgatgtcggagcgattgaatttgtccataaaaagctcattgagcagcgtgatgccgggaaagccgttcttctcctctcgtttgagcttgaagaaattatgaatctcagtgacagaatcgccgttatttttgaaggacgcattatcgccagcgttaatccgcaggaaaccactgaacaggagcttggtctcttgatggcaggaagcacgcaaaaggaagcggggaaagcaaatggttaaacgactctctcatttactcgtgccgctcatcgcaatcatacttggtcttgcggccggcgcgttgattatgcttgtgagcggctacagtgtggctagcggatattcggctttgtggaatgggatattcggagaaatctattatgtcggagaaacaatccggcaaattacgccttatattttatccggattggctgtcgcctttgcattccgaaccggactctttaatatcggcgtcgagggacagctgctcgtcggctggacagcagcggtttgggtcggtacggcgtttgacggaccggcatatattcacttgccgctcgcattgattacagcggcagctgcaggaggattatgggggtttattcccggcattttgaaagcgcgattttacgttcatgaagtcattgtcaccattatgatgaattatatcgcgctgcacatgaccaattacatcatttcaaacgtcttgacagatcatcaggacaagacggggaaaattcacgaatccgcctccctccgctctccttttcttgaacagatcaccgattactcacggctgcatttgggaatcatcgttgcccttctcgcagcagttatcatgtggtttatcatcaacaaatctacaaaaggatttgagctccgggcggtcgggtttaaccagcacgcttcccagtatgccggcatgagcgtgcggaagaatatcatgacctccatgcttatctccggcgcttttgcaggtcttgccggagccatggagggcctagggacattcgaatacgcagcagtgaaaggcgcatttaccggcgtaggctttgacggtatcgctgtcgctcttctcgggggaaacacagccgtaggcgttgtactggcagcatgcctgcttggcgggctgaaaatcggcgcattaaatatgccgattgaatcaggcgttccatcagaggtcgttgatattgtgattgccattattattctatttgtggcttcaagctatgcgattcgtttcgtcatgggcaaattgaagaaaaagggggcgaactaagtggacattgtgcagattttatctatcattgtccctgccacactcgtctatgcggccccgcttattttaactgctctcggcggcgtgttttccgagagatcaggtgtggtgaatatcggcctagaaggcctcatgattatcggggcgttcaccagcgtgttatttaatttattttttggtcaggaattaggtgccgccgcaccttggctttcgctccttgccgccatggcagcaggcgccctgttttcactgattcacgcggcagcggcgatttcgtttcgcgccgaccagacagtcagcggtgtcgccattaacatgctggcgcttggggcaactttatttatcgtcaaactgatctacggcaaagcgcagacagacaaaattccagagcctttttataagacgaaaatccccggtttgggcgatattcccgtcttgggaaagatcttcttttcggatgtctattatacgtctattcttgcaatagcacttgcctttatttcctggtttatcttgttcaaaacgccgttcggccttcgtatccgttctgtcggcgagcatccgatggcggccgatacgatgggaatcaacgtatataaaatgcgctacatcggcgtgatgatcagcggattgttcggcggtctcggcggcggcgtatatgcctccacaattgcgcttgatttcacgcactctaccatctccgggcaaggttttatcgccctggcagcgcttgtattcggaaaatggcatccgatcggagcactgggggccgccctgtttttcggattcgcccaaagcttaagcatcattggatcgctgctccctctttttaaagacataccaaatgtgtatatgctgatggctccttatatcttaacgattctcgctttaaccggctttatcgggcgggcagatgcgccaaaagccaatggcgtgccttatattaaaggaaaaagataaacattctcccctgggaagacgattctcagggatttttttctaatccaaaagacccccttaatttaattgtttattagttttttaacttaaaaaaatatgaagtgttaacgctttcttgtagactgtaacaaacaatacatgggggtgtatgacatgggagcaattccaaaaacggggacaatttcacctgagcaaaaagactcacaggagaaaaacctgtttcaaaaaatttggtcttgggaaatcggtgtgattcctttgccattatacacagtattagctgttattattattcttgcagcatattacaatgagctgccggcaaatatgcttggcgggtttgccatcattatgattcttggtgtgtttctcggagacataggccaacgcataccgatattgaaggatattggcggccctgctattttatctttgtttgttccttcatttttagtcttttacaatgtactgaattcaacatctttagacgctgtaaccaacttgatgaaaacgtctaacttcctttatttctatatcgcttgccttgttgtgggaagtatcctcggtatgaacagaattgttttaatacaggggtttatcagaatgttcgttccactggttgcaggaacgatcgcggccgttgcagccggcatccttgtcggatttatttttggctatagtgcctatgattcctttttctttgttgttgtcccgattattgccgggggaataggtgaagggattttgccgctttcaatcgcctattcacaaatactgggctcatccgccgatgtatttgtgtctcagctggtgccagccgcaattataggaaacgtttttgctatcatatgtgcagccttaatgaaaaagcttggcgacaagcgtccagatctaaatgggaacggacgtctcgtaaaatctaaaaaagcaaatgagattttcaatcaaaaagaagccgaagcaaaaattgattttaaactaatgggagcaggagttctgctcgcgtgtacattctttatttttggcgggttattggagaaattcatcttcatcccgggcgcgatcttaatgattatttcagctgcggctgtcaagtatgcaaatattcttccgaaaaaaatggaagaaggcgcttaccagctttataagtttatttcttcaagctttacatggccgctgatggtcggtctcggcatcctctttattccgttggatgacgtagcgtctgtgatttctataccgtttgtcatcatctgtatttcagttgttatcgcgatgattggttctggatatttcgtaggcaagctgatgaacatgtatccggttgaatccgcaatcgttacctgctgccacagcggtctcggcggaacgggtgatgttgccattttatcggcatcaggaagaatgggccttatgccgtttgcccaaatttcaacccgtctcggcggtgcaggcacagttatttgcgcgacagtgctgcttcgttttttcacttcataaacagaaagagttccgttttatgcggaactctttttttatttattcacaatccgaatatactctcggggaccaaacggcagatcctttgattccgtctcactcattctggctgacaggtggtgctccagtaaatacagctcccactcatcacaagccgccacaccgctgcgcccgtcatattgattcaacatgaatgcccctgcaaatactgagcagaataaacctgagcacatcacgacttttgttttcacatgaccagctcctttccttcagcttgatcaggattgattttaaatatacaaataacctcttttttgttagacttattttgaggtcaaaagaactcataaaaatccattacagcagttcgaagcgtggcagcttgcagaaaagtgcgatataatttggactaggtcgtttgaccgtatattttatacatagcgcatttttcaattgagaacgagaaaaggaggtcttatctttgcagctcttacatcttgctattttatcgccttttttatttgcttttatcattcccttcttggcaaaatacgcaaaaagagtgcatacgggctggtttgtgttgatcctgcccgtcttgctgtttatatactttctcccaatgatcaggatgacgcaatctggagaaacacttcgatcggtattagagtggattccgtcactcggcattaactttaccgtttatatagacggcctcgggttattattcgctttactgatcacaggcattggctctttggtcactctttacagcattttttatttatcgaaagaaaaagaacagcttgggcccttttatgtctacttattgatgttcatgggcgccatgctcggcgtcgttctagtagacaatgtcatggttctctacatgttctgggagcttacaagcctttcatcctttttgctgatcggctattggtataagcgggaaaagtcgcgctatggcgcagccaaatcacttttgattacggtcagcggcgggctgtgcatgctcggcggatttattctcctttatttgataacggattccttcagtattcgagagatggttcaccaggttcaattaattgccggccacgaattgtttatcccggctatgattctcattttattaggggcttttacgaaatcggcgcaatttcctttttacatctggctccctgacgcgatggaagctccgacgcctgtcagcgcttatctccattcagctactatggtaaaagccggcatttatgtgattgcgagattcagtcctattttcgccttttcagctcagtggttttggatcgtgtccctcgtcggcctctttacgatggtttggggttcattccatgccgtgaaacaaactgatttaaaatcgattttggcgttttcaaccgtcagccagctcggcatgatcatctccatgctcggagtcagtgctgcggcccttcattacggacatacagaatattatacagttgccgctatggctgccattttccatttgatcaaccacgcaacctttaaaggaagcttgtttatggcagtcgggattatcgatcacgaaacaggcacacgggatatccggaagctaggcggcctgatggcgattatgccgattacttttaccatttccttaatcgggacattttcaatggccggcctaccgccgtttaacggatttttgagtaaagaaatgtttttcacaagcatgcttcgcgtgacacattttgacctgttcaacgtgcagacatggggcgttctgttccctcttttcgcctggatcggaagtgtatttacgtttatctacagcatgaaattgctgtttaaaacattcagaggaaattaccagcctgaacagcttgaaaaacaggctcacgaagcgcctgtcggtatgctcgttccaccggtcattcttgtcgctttggctgtcagtctcttctttttcccgaatatattgtcgtacagcctgatagagcctgcgatgaactcaatctatccgacactgcttgacggccatgagaaattccacgttcacatttcacagtggcatggggttacaacggaattgctcatgactgcgggtattgttgtgatcggaacaattggttatttgtcgctgaataagtggaaaggaatctataaactgtttccttcgaaactcacactcaaccggttatacgataagcttttgactatgatggagaaaggctcttaccgggtcacaaaacaatatatgaccgggtttttaagagattatttgctgtatatcttcgctggtttcatcattctgataggcggagcttttgccattaaaggcggattttcatttaaaacggaaggcatggctaaaatcggtgtatacgaaatcattttgacgcttgtcatgatcagcgccacagtggcgactgtttttgctaggtcaagactgacggcgatcattgcactcggtgttgtcggttatacgcttgcattgttttttgtcattttcagagcgccggacttggcattgactcagctcgtcattgaaacgatttctgtggcactgtttctgctttgcttctaccatttgccgaaactgaggctgaaaacaaaaacgagaacgttccggatgacgaattttatcatttctttaggcgtcggtgttatcgttacactgctcggcatcgcatcctcaagccagcggacaaaagacagcattgcgtccttctttgtcaaacacagccacgatctcggcggaggggataatgtcgtcaatgtcattctcgttgatttcaggggatttgatacaatgtttgaaattacggtattaacgatagccgctctcggcatttacagcatgattaaaacaaaagtaaaagaggaggggaaaagcggtgaatgaacaaaaaacaaatgacttgattcttcaaaccgcgacaaagcttgtatcctttatcattttgcttttctctttctatttatttttatcagggcataacgcgcccggaggaggctttgtcggcggactgatcacgtcctcttccatcgttctcttgctcttggcatatgatttaaaaaccgtgcgttcccttttgcctgtcaatttcatttatgtcgcgggagccggccttctgctcgctgtattaacaggcgttggctcctttgtcttcggggctccttttttaacccacacattcggatactttcagctgccgatccttgggaaaacggagctcgccacagcgacgatatttgatttaggcgtttatcttgttgtcgtaggcataacgatgaccattattcaaacgattggagaggaagaataatggaaatcttaatggctgtattagccggtattatttttatggctgctacgtatttgctgctgtctaaaagcctgcttcgcgtcattatcggaacagcactgttaagccatggcgttcatttaatgcttttgactatgggaggattaaagaaaggcgccgctccgattttgagcgagcatgccaaatcatttgtcgatccgcttccgcaagccctgattttgaccgcaattgtcatttcttttggcgttacgtcattcatcctcgtcatggcctttcgcgcttatcaggaattgaaatcggacgatatggatcaaatgaggggaaatgatcaacatgaataattttgttattttgccaatcctgatcccgcttttgtcggctattcttctgattttcatgacgaagaatcttatgctcatgagaatcttcagcacggcggcatcggccatcgggattgtgattagcggcatacttgtacagactgtcttcacaaaaggcatccagacactcagcctaggcggatggaaagcgccgtacggcattgtgcttgccgcagaccaattcgccagccttctcgttctcacaacagcgatcatcggtttattggttgggctttattccttccgttctgtcggtgaaaaacgggagcgctccttttactactccggcgttcagttcttgcttgccggcgtcagcggagcgtttttaacaggcgatttatttaatatgtacgtattttttgagcttctgcttattgcttcctatatgctgattgtattaggcggcacaaaaattcagctgcgggaatcccttaaatatattgtgtttaatattgtatcgtctgccctgtttgtcataggggtcggctttttatacgctgtaaccggtacgttaaacatggcggatcttagcgtgaaaatcagcgaatcaggacaaaccgggctgatcactgtgattggtgtcctgctgcttttggtatttggcatgaagggcggaatcttccccctctacttttggcttccaggctcttattacgcgccaccggcggcaatctccgcgttgttcggcgctttgctgacaaaagtcgggttatatgcgattacgagggttttcacattgatttttattcacgatacagcctttacccatcagttgatgatttggctggcggcgctgactgtgatttttggtgtgatcggttcactcgcttattcgaatgtcatgaaaattgtgatctataacattattaccgctgtcggcgtgattttgttcggtgtggcagtacacacccccgcatccattcagggcgcgatctactatctgattcacgatatgctgattaagggcgctttgttcatgctggcaggtacgctgatcgcattgactggaaccgcgagcctgcataaaatgggcgggctgatcaaacgctatcctgttcttggatggatgtttttcatttccgctatttctcttgcaggcattccgccactgagcggatttgtcggcaaatttaaaattgcagagggcggcttcgcagaaggtgaatttacgatatccatgctgattctgctttcgagtctgcttgtactgtactctgtgctgaggatctttatacatgcgttttggggcgaagaaaaagaaacgccaaaaccaaatcatcgaacagctaaaggacttctttatccggcagctatttttctcttgctgtcccttctcttcggattgggtacagaatgggtgtcgccttacgttgatcaagcggccgagacgctgctgaatccggaaaaatatatcgaagctgttctgaaggagtagatcgcatggcatttcaaattttattaaatgtgtttctcgctttttgctggatgttcttaagcaacagtccaagcgccgcaggattcattacaggctatattctgggaatgctctctctctttttcttccggcgctttttcactcgccagttttatctatggaaattgatttctattatcaagctctgtttcatttttataaaggaactgtaccttgccaatgtcagtgtgatgaaatcagtcttatctccaaaactgaatatcagaccgggtatttttgcttttaaaactgaactgacgaaggactgggaaatcaccatgctttctctgctcattacattaacgccgggaaccttggtgatggatatttcagatgacagaacaatactttatattcatgcaatggatatcgaggatgcggaaaaagcgatttttgacattcgggagtcatttgaaaaagccatacaggaggtgagccggtgatgtttacgctgatcctgcaaatcgcgctcggcattatggcagtgtctacctttttgtatgtcattcgtgtcattaaaggtccgactgtgcctgaccgggtcgtggctctggatgcaatcggcatcaatctgatcgcaatcacggcgcttgtctccattttgctgaaaacaagtgcgtttttggatattattttgttgctggggattttatcgtttatcggaacgatcgcattttccaagttcctggagaaaggagagattatcgaaaatgatcgaaaccgctaaggtcgttgtggctgtattcattttgctgggtgctcttatatgcctcattgcttcatttggcgtacttcgccttcccgatgtgtttacacgcgctcatgctgcttctaaaggctcaacattaggtgtcaatatgattctgctcggtgtcttcttctatttgtggtttgtgacgggggagctctccgctaaaatcctgcttgggattctctttatctttattacgtcgcctatcggcgggcacttgatctgccgtgctgcgtataactccggcgtcaagcttgatgagagaagtgtgcaagatgactataacggaatcagaaactttgtgattaaacgaaaagaggattcttatttataaaaataagcagccggacaggcagagttccggctgtttttttatttcttgatgacagccagcgtgcatctggatatacagatcagcctctcttgctcgtcatatatgtgaatatgatagacaatcgtcgttctgcctatatgaacgggctcggctatcgcctttaccgttccttcctttacagattttaaatggttggcgttaatctccaaaccaacacaagcttgcgttgtatgatcaatcaggttctgtgcacctgcgctcgccgcggtttccgccagggccactgaagcgcctccatgcaaatatccgaacggctgtaccgtccgatgatccaccggcatgaccgcaacgcatcgttccgctgtgttttcaacaatctcaataccaagcgcttcaagcaatgtgtgcttcatatccatctctacaccccccaacatttaaagtacaccgtctgatttcgcaatcaaaaccgcttccgtccgtgaaccgacattcagcttattgaaaatcgatgtcaagctgtattcaatggaccgcttgcttaaatgaagggcatctgcgatttcttggtttgtaaatcccttttcaacttcttgaagaatcaggcattctctaggtgtgagcacatcttgttctttttgagaggaaggagccggctttgttttttgctgagtcatcagctgtttaaagtaagcaaaatcgactaaaatttctccgttgagtacgtggtatatgtattgggtgatcttttctttagattccgttttgctgatggcaccgtgcagacccgcacgaatcgcttcctcgaaataatcctcgacctcataaccggtatacacgataattttacaatgaggattctcttgtaaaatctgtttagaaagctccatcccattgacctcgccgcctagattcagatccattaaaatgagatcatatgacgagaaatcatgctgcttgataaactgttcgctcggttcaggactgagacaatcaacagacaaattcgaatccgtttccaaaattgtcttggtgccttccatgacagccggatggtcatcaatcactagtatctttttcatgttttcctcccttttactcactcttttccattttataaaaaagacttggcctgtgccaagtcgtttccgttataaatccattacaattcgatttcaatatcagccttaaagccctttccttcacttgtttcaatccgaaggcgcccatctaaagccctgactctctccttaatgccagaaagccccatgctcatggaatgctcagtatttttttcttgatcaaacccaacgccatcgtcctcataatgaagaacgattttgttttgaatactgatgagcataatcagcacatccgtcgcctgagagtgcttgaccgcattagacagaaactcttgaatgatccggtacaaattcagctgcgaatccagatcaagggaagccgtaaatctcccggtatttaaacggatatgaaacggaacccgctcctgctgctgcgccaccagcttcgacagcgccttcaccaatccaagatcatacagaagctgcggccgcagctcatgacacgtctccctcgtcatcgaaatcacatcagacatctgctcattcatctgtacaagcttgtcctgcacctcttcacggcacggattatcatccttcttgaaatcacccaaaaacagctcacactggcgttttaaggaaatcaaatcctgaagaaccgaatcgtggagatcgcgggcgagtcctgaacgctgtttttcttcgattgcaaacattagctttttcagccagatggggttggttccctcttgttttaagtccttcaaatgttccatgagctcctcaatatgcaggacattttccatggacacacttgtataaaaagacagtgttttcagccacgatatttcatcacgtgttagccggggagtgttaatattagataaacaaagcagaacataagaactaccgcctcgttcaccaactttcataagaaagccttgattgacttctataattttcccaatttctgaagttacgttttcaaattcctcttgataaaaattccagtccggtccaacttcatgcttatctaaaaatatcactttgtgatcaggagtaacctcaaaggtataagctttgcttacaagcaaaacatccagtatagtatttttcagttctttaaaaacttgttgaagagaagttacacccctcattagctgagtatatttaaaaatactgtcctgatagttgaatttttcggagaaacgttttaaccgaaatttaaaatccatgacctctttaaaataaaagacagcgaacatgacaacgaaaaaaaatacagtttgacgcacagggttcatctggatgtccattacatcaaacagaactaatgcaccaactattagaagagttggtatcatggcaagtagagcatagtatctcattcttcctaagataaactctatatcaaacatcttattggctacaaattggtatactaacccgaacggaattagtactagtaatgacgccgaagctaatgccgggaaaatataattacctgtaaatattattggaagaacaaaaaatatcaaaaaaggcgcaaatgaaagagtgtttgttaaaattagtaatttaagaataaacgaatgctcagcatatttatatttattaagatgtaagtatatcgctgaaaaagaaaatagagtcaaagttgcaaaagaaaccaaattaagagttgctaaaaaatcaatatctacttgtaaatagtcttgaaaaaactcaataccaagattaaatattggtatgatataaagaaaagaaattctattcaaaaaagttttacctatttctccaaggtatctttgtataaattgaagataaagaataggagaagatataaaagtaaacaagttaatataccgattgattatatgtcctctaaatggtccgcctgcacttatatatgctatcgaaatgtctaataacaatagaataagaatataggcagcaaatgatctcctttttttatttactttaagtatataaaaaatacatattatgcttaaaaaataaaaaaacaaaggaagtacgaacagaaaaaaactataaggtctatttagagtaactaaatcaaaatctttgagatgaatcttttttccacttctcaaaatatccagactgttaatatgactcaaatatccccatttcaaatgtttgtctgaaggtttttctttattaatttttaatatgatgtctccctgtctcagaccaacaaattgtccatatgaagattccgatatttcttctatcataaattgacttttatcatttttatgaatcttagtcccaataataattccattcatactgatataagttgtatagcttatataaaggatactcaaaacaattacagctattgtgaatttttttattaagttcttcaatattaatccacctattaatcaccccattgacgggttattggatcagccagataataatcattataagctttaattattgtttcagtttcttgcacatcaaaacctataaggcaggcttctttatttttcaatttttttaaagcctcaggataatttaaaaagtagttaattaggtcttgcatcttgtatccccctttgtataacttaataagcattcctttattagctcttttttttctttatctaaatttaattgttctatagcagaaatacatttctgtttatatatttccaataataccgaaatgtattgagtaactcccgctttaattaatttttcttggaatttctctttatcaagtaacgatttataatataagtctttatgtgaaattaagtataataaatcttccgaagcatcattaaaaaggcgcttaagatataagtaaatcagtgtatgtttgtttttttcaatatcactgcgatttccggataaaagaacataataatctccagaaatttgagctataatccctttatagtaggaatatctttcaactgtttcattatattctcctgtagccaataaaacacctgctacatttgctagtgcaatcagacttccacattttaatctaattacttctaaactttcatcttctgttttagatttattagtgatatcgtcatgttgaccttgcatggcctcgtttacgtattttaaaacatatttaaaaattagaggattgttatttaatgaataaatactcgttaatcctactgtatacaaggaaagtgctgcatttaacgactccgagcgattaattttcatccataatgcatggtgattatcttcatcttcaagatcatccataatatctgatgaaagaataagaatttctattcccgcgccaagccttgttgcaacatctaaattctcccctccaaaaacaacataatgtaagattgtggattcagcaaaggagaatgtttctttagaatcaataaatgagtaaagaagttgtgacaaatcctcgttaaatatgttttgctccacaatctccttcattttctccttgatccggacagaatctaaacatatctgctcaataacgacttcccccctcccattccattttactaaatgggacatttaaaggacagcaggtttttcgttttttaacaatcatataatactttatccatttattgtatcggtagaacgaaaaaaaagacttgtttccaagtctttttcacgaaattttcattgcataattgtatttatcgagttgatcaatgcttttgttaatgtttcgtaatgaatctgtcgtttctttaatatcaagttcgagtcggaataacaattgttttacttcttcaagtttcttttccatcgtttccacactcctttttttgaaagatcaatgaattgtgtatggtgaacgagtcctaggtatttgatctgttactaatagtgtatctgctttcggctcatttttcaccgaaaagtatgcaaaaaagtcctgcgtgacaccgcaaatctcaataggtccttatactcaaaggaatcacaacaagaacgggactatctttctatgcgaaagagcgtttatatgtgctgaaattgagaaagattcttaatctccttgattttaacgggtttcgcattttcactaagcaagactatagtccttcataccgtattttcaaaattgaatatgcgattcttggcgtttcctgaccgacaaacaccgaaaaagaccgcaacgctaaagttgtggccttttcgctttgtcatattcggcaattagggatctatacatatagaaacatccttttttgcgaggtgctcccatgagatatcgttatccctggttttacgtgtatccgtatgaggtacgccgtccgcccgctcctgccaacaatattgatacctttatccgttcagcgaagcaggccgcagggatatttgcggatgcccagctcgttctcagccgcattgcgggctcgcgggagctttcgcgccgcattctgaccgcagccgaacagtctgataaacaaactataaggcgcctgatcaaacaaatgggcgtccggcatgaagtggatacggtctttaatcccgacggcatctatatcagccttatcggaacgcaaagccgaatgattcttgctttgcggtggtcagaggaccgcaatcattttgcgtccataagattatgacaccattccagagcctctaaataacattcatacgcttcttctttgtccagttgattgcctaattctgagcaagtgtcccagttgttgctttcaattaatttcacaagctcaagcatttggtagtagtcgttttgatggcctaataatgcttgcccgacttcatcttttaaaggcaattcttgaacaatttcctctatttctctatgcaggagggtgtctatgagagaaaacattccgatcagcatataagaagcaggctgcggccgggatgtctttctcgccagcagttcgcaaagctttgctcttatcagagaaatcttaatgatttcgtgcttgctggaatgccctttcctgcttaaatccttaaaggaaagaatatatatccaccgtttgatttcattaaatcccagcagcataatggcctgttgaatgctttcaattttctggctcaaacggctgtgggatgagtttaaaaattttaaaatttgataggacagtgataaatcccgctctatgtactctgtcacacgctttatgttaggctgctctttactcagttcgttaagcagttcatagtaagaatagaaatgagtcgataggtcatgcccgctgatgatgcgcggctcgctgaaaaagtagccttggaataattgaaagccgtcttggaccgcctgtttatattcttttcgggtctctactttttccgctaaaaaaatcaggccgcggcagccgtaggtttgcaaaattgttctgcgttccattcgtgttgttttgagaaaatcaattttcaatatatcaatatagctcatgagtttttccagtaagtcctcatcttgcggatttattgcataaaaatcatcaagcgccagcatataccccatttttttcaattctttgcatctagaaatgagggccggcgtgatcggtatatcttcaaggatttcaatgacaagctgtttcggattgaaggaggtgggaagattcgaaaacatcaggctttccgtaaaattaacaaaacagcgtttcccttccgtcagcttctcaattccgatgtttaaaaagctgttgatcaccaaatctgttgttgcctgatcgccgtctttagcgctatacacgttctcttcgctttctctatacagcagttcataagcaacaacctgttcttttctattaaaaataggctgtcttgcaacaaacaccctcattgatttatcccccttacaatacgcgcggctttcacccctaagtatatcaaataatttgacgaaaattgtctaaacatgaaaaataatatatacataaagaaaactggcccttcgcgaatgaaaggccagtttttctttattcttcctcaagctcttcttcaattctgcttttcacttcgtggatccgctgcattttattgctccagcagtcctcgcttaaatcaaccgggtattcctccggcttgctgattctcttatattcctcccaaagcaggctgaggttatcctgcacatactgctgtatgtctgaaatctcagggttttggtagcaaagaatacccttctcaaaaatcagttcatgaagatccttcgcataaaaattcgtgacaaatttgctgatgaatgtatgaaccgggtggaacattctgagccgcttctgatcattcacctgctcatcataaagcgcaatatagtcgccttcagaatgatggttggactgattaataatgcggtagactttctttctgcccggtgtcgtcactttttcaggattggacgaaattttgatcgtgtcgaccattttcccgtcttcttcaatggcaacgagtttataaactgcgccgagagccggctggtcataggcagtgatcagcttcgtaccgacaccccagacatcaatgcgcgctccctgagcctttaaattcataatggtgtgctcatccaaatcgcttgaagcaatcaccttcgcatctgtaaatcctgcttcatcaagcattttccgggctttttttgacaggtacgccaaatcgccgctgtccagacggatgccaatgaaattaatgcggtcgccgaattccttggcaaccctaatcgcgttcggcatgcctgaacgaagcgtgtcatacgtgtcaactaagaagacgcaatccttatgtgtttccgcgtattttttgaaagctgtatattcatcgcggtaagcctgcacaagcgcatgcgcatgtgtgccggaaaccgggatattaaagcgctttccggctcttacattgcttgtcgcgctaaagccgccgattaaggctgctctcgctccccacatggccgcatccatttcgtgcgcccgtcttgttccgaattcaagcgcaacttcatcaccgatgacgcctttaatccgggcagcctttgttgcgattaatgtttgatagttcacaatgttgagcaaagctgtttcaatcagctgcgcttctaccaggggtgcctccaccctcataatcggctcattgttaaaaacgagttctccttctttcatggagtaaagtgaacctgtaaaagataagccgcgcaaatattcaataaaatcttcatgatacccgagttcatcctgtaaataactcaaatcgctatccgtaaacttgaaattttccaagtattcaatggctttttccaagcccgcaaatacggcatagccattttcaaacggaagccttctgaaaaacagctcaaaaatcgctttcttttcatgaatgccgtctctccagtacgtttccgccatattgatctgataaaggtctgtatgtaatgacaggctgtcatctttaaatccgtactctaacactgtttttccccttccttactctgccacttgcgctccgatgctgtttgcaaaatgggaaagagcccatgcgtgcccctcctgattaaagctggcaacagcttgtttatgcacaacaatccgaaaacctttgttgtatgcgtcaacagctgtatgcaacacacaaatatctgtgcagacaccggcaagatgcagttcgccaatctgccgctctctgagtttgagctctaaatcagttcccgcaaaagcagaatatctcgttttttccatgtagtaaacattaggttcatgttcatgtttctgatatagaggcaaaagctttccgtacagatcttttccttccgtgccttttatattatgcggaggaaaaagacgggtttcagggtgatattgatccccttcatcatgagaatctactgctaatacgacgtaatcaccgtttgtgatgaattctttagttaaattgacgatcgcctcttcaatcattctgccgggctccccgcaggtcaattttccgtcactcgccacaaaatcattcgtataatcaatacaaataagtgcttttttcatagccggcctccccgccatcagtatgagaacattatatcttatctccagttgtaagtgaattgccatgaacaaaaagacaaacggtccgtttgtctcttacgatttcagtactgaccgattataaatgtcgtcctgaatatatatcaattcacgattcacagcgatatcagccgcaatgacgatgcctaagggcgtatgaaactggagatcagatacaatcttgaaaggcactccgtaccggctcgccatttggatataagaagagtaagactgatactgaagctctccattaatcaaaagggtgacgttatggctgtttttcagctcgtgctctgcctctttatacggtttgcttctaagcacctgtcctttcgtcagtgccaaaacgactctttctcttaaagagcctaaaaacaaatggcgctcgtcaggctttgtctccaaaggcccatacattccttgctgcaaatagagatccattttatcttcactcaaaagcctgtcctcccgtcttgtttgtcttcattatcacctgatcaggcaggagctaaactttcaagcgccgtttacatttctgttacccaatgaatgatttttttggccagctcaccagcaggggtttcctctgtatgccggcgcaacgacgcttccagccgttcaggcagagttgctttatcttcttcataggaaatgatcgtgctccactccagctgcggtaccgctacaagcgtgcgcagttcttttctgttttcatgcagatacacgtccgtgatcattccggtttgcgtattgatatttgcttttctgattttcataacatgacctctctattcaaagactacccatattatacaataaaaaagcaacagcctcttgtgaaaaggctgttacccgttaaacgaaactgtttcatcagtgatatcggcatctttgaagagagttttactcgtttggttgttaatcttcacaaaatcaccaagctgaaatgtgcctgaccccgcccctgaatgagcgacgcttttgggcgaaatcgcaaatacgtctccaaagcttgccgcggcattatccgtaactgacatgatataaatcggccccacaattgcaggcatttccccacctccgcattgatttacagcatcatatgcaaggagccgataatggtgcccgcctattcagctggctttgcgttttcctcgagtcgtgaccgctggcgcagcttgatcaagcggacaatattcaggaagaacgccttcactaccgcataaaccggcaccgctaaaatcatgccgagaattccgccgaagcttcccgctccgattaatagcaaaataatcgtaagcggatgggtattcagccgctttccgatcacaagaggagacagcaggtttccgtccagctgctgaacgatgacgaccacaataatcgcaaacagcgctttggccggcgagtccataaaaccgacaatgacagccggcgcggcaccgagaaaaggcccgacatagggaatgatattggtaatcgccatgacaatcccaagaatcagggcatacggcagtccggcaattaaatagccgataaaacacgctgttccgacaaaaagacagattaacagctgcccctggaaatatgccgcaagcgtatcggataaatctttaaaaatctttaagccttctgtccgataagaagccggtagaatttttactgccaaatgcggaaagcggtgtccgtctttcagcatgtaaaaaaggataaatggaacagtaataataacaagcgtgatgtttgtcacgacaccaaacaccgcagataaactggacgtgatattttgcggcaggttttggagaaaacttgtcaatgactgttcaatttttgatatcgatacataatcctggttcatcatccaggtaaaccattgagaatgggacaaatcctttgtcagcgcctgaatctgttttatataatcaggaaggttgttaaacagccctgtcacctgtgcggtgatgataggtccgactgacgctgaaataaaggcaagcaaaccgataaacagtaaatagatcaatagaatggataatgtccgcggaatttttttctcaagcaggcggacgaccggattaaatatgaaatacaaaattcccgcaattagcatcgggaaaaacaatgtcgagataaaaacaataaacggctgaaatacaaatgaaacttttgttgctacaaaaataatcagcaaaacaaataaaatctgcaatgtccaaaaatggacttttgatttcaacaagctttgttcctcctagtttttctttgtctgtcagataaaagaacttataccccatcattgtaacaaaaatgaactcatatcagaactcttaatataatgaaaggagtgttggtgatgaaggccgtgacatacgatacagattcagaactggcttatatctatgttcttcctccgaaaaagaacaggaatgtacggactgaggagctcagagtcaatgattgtctcctgctggatatcagccaagatggcaaaatcgccggattcgaatgttttggtgaggcagcacacctctgtgccccatttgccgggaaatcccggctgtatgtaaaagattcagacggttatcattttcgggtctgccagcatgcttcagtccgttcctgctatacggtgtaccgtgtcactttctgtttttcagatggtgactatcaggaatttgccggctttgaccttgatggaacaatgtatcatagtgcgtttttacagcgcttaactgaaaaataggacgtcctgttgtacgcctatttttcatgcgcaagcactgttagacccgctcactgtaatctggggtgacggaaatcatgtgctggattctgatcaaacaaacagaatttcgggctccttcaattgtgatatggtcaggttttacatcgatcagtctgcctctgaccgtatctcgtactgtctgtataacgaaccttgagccgatgagctttttaatggtctgatagacataaggatcgactaaagagaccagttgcggactaccttggttgaccatacttttatcccctttgtgtgttttatctcagcttatgccgcgcttatggataatgacacaggcttacctgataaaacaaaggggtgcggagattttaggagaatacgtttggaggcgggtgtaaaggaagtatcgatgaagcggagacagcgaagaaagctggcgctgttccgtacttatacaggctttatcacggatgcctgggcttggtcgattaattggtccagcttttctattttttttcgtgcggttgaaggatcaatttggcggtaatgatggtggccgcccggctcttcatccagttcgtccgcttttttgacaatctgctgcagtgtgtttttatctaattcgccttcaggcaaataggaatctgtatgaagcaaaatggctagtgcaatctcttttgctgctttcggttcctcgccaagccgaatcagaagtttatgcgcccgttccgcccctttaatggcatgaatgtcatttcttttgtatttctcataatcccactttccgtctgtataccattcataatggccaatgtcatgaagcagtgccgcttttgctgctaaatcaggattaatgtcagccttcacagacagcctgtatgcatgataagcgcaggcaatcgcatgtgccacgccggaacgctgaagatatttttgtgcaattggatgggtgaaaacatccattaatgtaacctttctcatggaaacccctcctttagatatttttagaatcctaacataatttgcagagaaactcaattcttatgtcacatcattttgatcttcttatcatcattgttataccctaaaagcaacgtttcagtcagtatatgcggctgttcaataaaatgcgctggctgcagccttttgtataaaaaaaagagcagaaaatatctgctctacaaaaactctttaatatcataaatgcggccgttttccgtccctttttctagtaaagaaagcagcgtgccggcaataaagtccggactgcgaaggcttcctgtttcatttaatttccggaatcgttcaatgtggtggaaatcctttttcgatgaagaacggatgacggcctgcatctcagtgtccatcactccaggtgagaacgaaatcatgttcaccggcagctcttcatcctcctgttcaaatccgaatgtcctcgtaaacatgtcgagcccggcttttgaactgcaatacgcgctccatcccttatatggatttttggcggctcctgaagtaatgttgacaaccgtctttttgccgctgtatgaagcaaaccgttttgtaaacagctgactcaaaagcacgggcgcagtcaggttcagctgataatggcgctgaagctcgtcaagagacgcttcgccggcacgtttgatcggcgttaccattccggcgttattaataagggtaataccagaataacgatctgaatcgatggatgagagcaatgtttcaaattgctgttcagcttcttcgagattgatgaggtctatttgatgctgcgttagttttttgtgagagacatctgttttcgttctggataaggcatggacttcatgccccttttctaaagcctgtaatgcaatggcttgacccagcccttttgacgctccggtgatgatataaagttccattggaaacctccttttccgttattattgtacggcacctcttttacacaacacaagcacgcggcctacgccttcttgttttcctgcgctgtgacttttgggatgaggaacacgatgcctgcaattccgagcaggatcagtacgacatagatcatcggcagcagcaatgatgatgtttcttgttcatcttctgtttccgttgatgatgtctttgtcattggtttttcagcaaaagtaattccaagctgtttcgactgggccgcaatcgtgttggaatcctcggcatttgttgatgtaaacaaatcttttatcagctcggcgtccttgtccttcggtttatcaaaagtgatatccttttgttcctcaggcagttctgttttttcttcatagtaggtatcttcatgcaaataattcgtatcgatttcgatgtcttttttctcatactggtttggcgcgacatctgtattttcttcagtttgggcagccgctgcagagggtatgaaaagggaaaaggagagcatacaaatcatgatccccttttccatgctgcgatcacgcttcatacgtttcatcgctttctgctgtgtgttcagccatcaaccggataatcagcggcagagccacggcaatcaccgtaatgatcagcagaactgttattcccattgtaaacaagtgcccagtaccgtactggatgtcgatatatactttcgaaaccggatcttcaaatgtaaagttcggcatgatcaaatcaataagcggtgcgacatagaataggatcattgctgctgaagcaacccagccagggattgatccgaatctgaatgccgtccggatgaaggcagagcttgcgaccagcaatagaatcgtaaacaccgaccacttaatcgtctgatcgtccggcagtgaataaatattcaagccgaacaagctgatcataagtccgacaaggatattcagaattccgaataacgctcctttgacgagaagcggtgcgttttggtaatacgagctgaaatagccgattaacagactgctgatcaacacaatgacaaggatgacaaccggaggtaccgtctgaattttttcttccggaacctctccgctgattttaagcggattcgctaagtaatcatatacatagccattgttttgcccgtctactaatgtatttccgagtatgccgtatacgtcatttcgcacgagtttcgtggaggcgacatttttcccccagttgttgtttaaggtgtcggctttcgcttgaacatcattaacgctttgctgcatgttggttgtgtaatcaatgatgccggactggcgatcagacaatgaacccatcatgtctgacatttgcagcacttcctggccgaccgtatcttggacactcagtgccatggtaccagacagcccatcgttgctgaacgtcgcagattcctgtgttgcgcccgttacaagctgttctgacgcttttgcggcactttcagagattttcgtcagttcgtcgagaacacctgcttgagagtcacggatatagccgctgtagtcgtccgcaaatttggtcatgccgtcgatgaagctgttaatatcctcatctgtttgcatcgtgttgtttttgagagcttcccagctggctgattcttcaggtgtgagagccaggactgattggacgttgccatcttgctcttggatgacttcacctttaataatagtcaaagagcctagatccagattatcatttagcgtagacttatataaatttaaagagttgtaatacttcatcaagttagaaatattatcagtttcaattctacttgaaaaaattgaacttagtttttctttctgatctatatagcctctactctgcaaagtttgtattatttcgtcttccaaattgtatattaacctataagcatcattgacattattatcaaaatcaaccaacttttttgttaagtcaccaatttgatcatttaattttgaaactgttttatttaactctttaatttcttgatttaactcatcaatatgtttctctagtttgttgttatgttcctcttgtttttcttgaagtgcattttctatttcctctaattttatcgctgcttcgttcagacgtttttttgcacctgaaatatcagtttcaccgtcagctccgtcaccctgtagcccatcactttgatttgagccatcgttttcatctgcgagttcaatcaaagagaaatctgttttagaggttcctgtattctccgtgtttgtatcttgttcaggaacgttttttgaagattcttgatgtttttgtcccgtttcaatgttagtttgaacatcattttgtgatccattatcttgagtaccctcttctgatgagccagtatcttcatttgttggctgatcatcggatgttggaatatcattcgacggttcttcagtattaggagaatcatcggttgatggttcttcagcatcgggtgttgttggtttttcttgttcaggttcttttaacccttcagagatatctttaatttcagttgcaacatttttgagctcatcccgctgcttctctaaatccaattttatatcttcaatatcttccttatctgtgtcatctttattatcagatgtgtcttctccatcttccttttcgtcgctttccttaggtttaagtaaactaaggcggttcttcccgatattctcttgcaattgatttaaattttgatatttaatagcttcatattgacttttatatcgagatagaaatgcattaaacatgtcattctcaatttttttcatacccatttcttgcaatggcacttgattttgccttaacttttcagcattgttcaacgcaaggtttgtcagtcctatttgtgtcttcgcttggccgatcccggttgccaatccgctcatgcgttcgctgaactgattcgccttttgctgtgcctggatggcatccagacctgtccggatttgctgctgtgttgaatcctgggctgccaaaagcagctttttctgattctcttgatattctttgtacctttcaactgtatcaatgaattctttcagcgtgtttttggcttcctccgccgtagaagctttttcttttgtcgtgccttgcgcttcattcattgatttcttcagctcatcgattaagtctttttgctgtttgatttcacctgctaaatcattagagcttggtttgtaaaagttgtacatgacattctggaattcagattctttattgacgatcttgtcaaattctcctctgatgttgtccactttttgcgaaacaaaattccagtataaggccgacatttttttgttcattgtcttttgggcatcctcaagctcacgctgaactttttctttgttaaccgcattcaggttatcttgaatgctgaattcgagcgttgccttttgaggatggtctttgtcatagctcaaaatgttttttgagaagtctgagggaatgtagacaatcgcatcgtatttctttgaagcgagaccggtctcggccgcgcttcggtttacgaccgtccacgaataatcaggacgttcacccagaacggccgctacttccttgccgaactgggcggatttgtcctcttcatcagactttacctcatcactcaatacgcctgtgtcttcattcaccaccgcgatttgccgggtagaattgactgcttttttcgttgggtcgtctccgataaatcggaaaaacaacaccggcagcagcaaaatgatgatgacggcggatattaacttgatcaagctttttcgttgttctgtcatctagcactctccctttcagcagaacataaaggaatttgaactttttgctccttcccgttttccacaacatatccgaagcccggctgaatctcaggctcctgtctttggtacgggagaggaatgacattttgctcagactttttcatcagcagaatcgcgtggcggatttgcttcatctcagtcgtcaaggagtcatagccttttgagaattcgctgtggtttccgcccgggataaagctgaacccaagatgagcgtatgatttcatgaagttagcgagacgatcttgtattctcgtatcaatcgtctgctggaatctcgttatcccgtcaatcatcagcacgacttgtgagaatcgcagattttgtgcgtctccttggcggacggcttctacatacatggcttctcttgttttgaaaatgtcttctgctgtttcaatccactgctcaatatcttctttcgtttccaaatatgaaacatctgattccttcgcataatgagataagccgcggtcaatcgagtcaaacaggccgatcatttcggtttcatcatcaatcagatgttcaagcatgacttttaggacgtttgttttcccgcgctgagtttggcctaaaatcaggcagtgcttatgcttgcccaaatcaaaatagactgggctgactgtttcttcatgaagcccgatcggtacagataaaggcttgcgttccagcttgaagcggatagacaattctctcgtcgacaagctctcaggcagcatcggaatcggtgccggctgctccattgaagcaaatcgcccttgaagtttctgtacgtctgatttcagctcgttgaacatgccgatatcatcatcggcgtcaacaggcaggaacatttgcgcgaaataaagctcttccttttgaatgatgacgcgtcccggaatcggctcaagattgaatttcggacggccgtaaatggaatatccttctgattgatccatgagataatggacaatctttgttttcaagttatttaacaatgactggcggacagcattcacccgcgttgctgtcagcataaagtagatacccaagctttgtccgtctctggaaagctggacaaattccgattcaagctcatgcatctcatccttgacaatgtcaaagttgtcaatggtgataaaaatgaatggaagctcttcttcgctcagcgcattgtacattttgatgtggctgatttctttttcccggaacaaacgtttacggcggtcaatttcttctttgatgcgaatcatgaacttttcaattttccttgactggtccatcaggaagtaatccgcggtatgcgggagcttcgctaatggcagcagcgttccgtttccgaaatcaaagatatagacatgaagctcttcaggtgtgtatacgtccgcaaaactcatcaggaacgttgcggctgcaatcgattttccgtagcccgaagagccgaagatgccgatatttccatcttccatcatcttataagcaattggcgcctgtctttgcagatcaggttcatcgacatacgcaaagtggaaatggtctttttcgtttgaagggaaaagagtgcgcggaatacgttccgcaagcggcggcagccaagggcttggcagcttctcgattcccatttcatcttggatgcgttcaatttcgtcaactacagcttcgatttcggtttgaacgtcttttttcgcgttatcttcggtatcaacctcagaaagcgggatcagacccgtatctgtgacgatcgcgatttcatcctcggtaccgtagacttcctctaagtaaggcgccccgctccatgcagattggaacagctcatacacttcattgtttccgacctgcaaatagccgcggcctgttacggtaatgtttgcggcatcgctgtttttcaaaatttctttactgtcggtggcatcctggaccttgagcgctactttaaagcgcgagttactccagatctggtcgtcgatgatgccgcctggcttctgtgtcgccaaaatcaaatgaacgccgaggcttcgtccgatacgcgcggcactgacaagctccctgataaaatcaggctcctcgcttttcagctcggcaaactcatcagaaattaagaacaagtgaggcatcgccacttctgctttcccttgcttgtatagctttgtatagtcattgatgtgattgacttgatactggtcaaacaggcgctgccttttttttagctcgcttttaatggaagcaagcgcacgcatactgaagtttttgcttccttcaatatttgtgatcgtgccgaggaggtggggaatgttacggaacggctgcgccattcctccgcctttatagtcaattagtaagaaagccgcttcatgcggatgaaaatgcactgcaagtgacaagatgtaggtctggagaaattcacttttccctgatcccgttgtccccgcaagcaagccgtgcggaccgtgtgctttttcgtgaaggttcagatacacaatgtcatctttccctttatagccgatcggcactgacagcgacttcgacgattcacttgtcagccatctttgctgaatgccgatttcttttacttccttcgcatgaaaaagctccaggaacgataccgtttccggaatggaattcgtaatgccgacctggtggttcagcgtccgcagtgtgcgtgaaaaccgttcgttatcctcacgctgatgatgatcgagacggaacggaattcttaccgcttttttcttttgtattaaaatgtcgccttcatgctcattaatgtagcggacaagagttgtaatgttttccgacaagctttcctttgtttctgcagcgacaattgtcgagatgcccagatgctcatgctgcccttctaaatattcgagaatgacatgctcagagatcagctgctgattcgtgatgacaaatacaaaatgcggtttgaactgcagtttttctttgtcatcttcgagatcacgctctctgatcaattcgtaaagtgaagacaggagctgatctcgggtttgctcattataaataaatccttttgcataaatatggggcatttgaaattgcggaagccacttcatccactcccagtctttatactcttcttcatgaaaaataaatacgaaacgcaaatcgtgatagctgttaaagaacgacagctgtccgattagctggtgaatctcatttttcacaatttgtgatttaccgacaagccccatcggaccttctgccaaatcgaccgtcaccggcgcattacggatatctttatagacgcgttgcatgtgctgcgatttctccatgaggtcatcgatatcacgattcgccaagtctccgccactcatattgatttcatagcttgacggaactgttcccgtcccaagccgcagctggagataatccttgctttcaagtgatttttcccagatccggtcactgatttcacttgttaagtatttcatttgttcaaatgaaggaaagtgaaattcaagaacctgcttttgcttttcagcaagtgcctgaagctctttccgcttattgtctaagtaaagcttatatacacgctcccgtttttcctcgcgttttttccgctggtttttatcacggaaatattgcactgtcgaggtaatgagagtcatcataaacatcgccaaagaaacgagtataaatatgccgcgcggctggatgatggcaactacgcccatcacgatcagcatcacaagcggaggcaggatgacgagccacagccctctgttggtttgatcgctctcctgagagggaaaactgaaagaaacgcggtcatccggcagatcgtataccatccgcggcgttcttctgtactgcggatattttttctgcatctctgtactcggtttgaccgtttctgttaacgctgtttcaaactgggcataatgaacaatttctaaaaggtcttgttccgtcaccctcatttgcgtgaagttccagaatatttcatcccccggcttgagcggcgtattggcgttgattttctctccgttcaagaagatcgttccgctttcagggcggaccgaccagctgccgcctgcacggagcaaagaaaacgtgctttgttctgcaaatgcaaaatcttgcggattcagataaatatctgcattcgttttttctgaggaacatacaatttcatcccgatttcccgtaaaataaacggatttctcaggttcactgcccgtcaatatcaagcgtatatcctgctgatccgtttggagagtaaatgatatatccgtctcaatcgtgccgagacaatcatttcccaggaaaacttcgtattggccgccggattcctttcttttaagagaaatcactccgctattaaatggaatggtgctgatcgtaacagaatccttcacatcaggccctatggtcaccggatgagacgacgggaggttagacagatttaatttttgaacgttattttggtaaaaaacccataatagactcaaatggcgaacccccttacggccgaatggcagcatgcgatgacctgcgcttcatgtctcacgttatttgtcatcttttttctcatctttcttttctgtttcttttttctcgtcttctttttccttctgttcttcttttttcgctttttcctcggctgcggctttttcttctgccgctttctcttctgcttgtttttcttcgtctgtttgtgtctgttcttcgcttgtatcgactaacgatgtttcagaattagactgtttattttcttgacgttctttttgggctttttcaagctcactatttactgaatcaagttctttttgtatgtcttcatcatttgtatcctcagataaaagctgctgtttatatttagctagggcaaagtaaatataatcattgtattccagcttacggccgatactgatcgcttctttgtattctcctcgaccataatcaatccaatataagaaatgctgagggtctgattgaagggtgactaaattattttctatatttttggtttttgcactccccaggttttcgacctcaacataggacgtcgccagctgatactgcaccgattcaggcaggctttccgcatcgtacttggacagtgtgctgatgacttcactgtactgcttgtttaagaacgcacggttgctgtccactatcgcctggtgctttggctgcgcgaaaaataaggcgtacatcgaataaataagtgccggtacaagcaaaacaatgagccccaggccgatatatcgctggatgttccacttctttctcgggatatgtatgtatgtttttgctttggcttcgagctcatcaatatgggtttgaatcagctcgagcaaatcatcataggattcagcatctaatatcgcctttgcctctgcggagaacgtcagcgtttcattgaatttcaggtagtcttcaaacgcaaaagcgccgtcaactgccaaagccgctgccgctttcagctcctgccatactctttcctcatcacgctcgtaaggaggaatgctttcttttactccataatggagaaaataaggcgtaagccctttatcgaatacaatgttttcaggagcgacaatcaaattcagcctcgacagattgtgctgctgtacggcttgaacaagctgataggcaaactgccatttactttttttatccttagctttcatgaagcggaatgctttataggaggagggaggttggattgtgatgattacttcatcatccgtcacatcgatttctttatgaaaaaatggatttatatctttgatcacgttagcttcaagaccgtcgagaagctttattttttcccgttgaaaggtaaatgtatagccggcatctgttttctcggcaacagcttctaattggttttctaaatatgatttttgttcacctgacattcaaccagatcctttcataatatttcaagccggtctccgtttgtaatgccgcaatcagacagcttgcattctccggaaaacaccttatccttgttcaccactctgatccagtgcccttcgcgcggaggcatagatacgctttgggcctgccaagcaatatcaattacttttttcaccgggtggtaatctgacaatctgagatcaaagacactgccgttataatgtttcaaatctattgtaatatcaatatacatttaggatcacccttacatagaaagagcgccgtcttcttttgaatcaggcgctccttccctttcatactgttatccgcggatttgatttgcgatgtcttggtcagtagactcaagtgtatttgctgtttgatcaagctgctgattcacatcttgaagcaaatctgacattttgataaatgaaggtttgagctgctcgtattgatctgcgaacgcttcgcttgaagcaccttcccacatgcttttcaaatcagagatcattcggtttaaacgatcaacctgatttaatacttcttggctttcaacgccgtattgcttcgccatcgctcttagctcttcgggtgtgacacgaattaatcctgccatattcctcattacctcctgtgccatcagcctaaatatgggctaattcacttatttttagaacgtcattattataaaaacagtttttcggcatagtcaaacaaatatgttttaattttacaaaatgagtccaatggtttaccccgaatcactcaaaaatgacatatactgtaaagtaaataggtttattttcttaatcttctcttcattctccgaataatccaaaagacccaaataactctccaactcccaaaaaaaacctttcagaaaatttgatgctacagcaccatttctgaaaggttcagttttttctttccttaattagtcttgcctccgatgactttcttagaagattaataggataagctgtcgtattatatgagacatacactgtcctgcaaaaaggcgattacaccgccaaatgtatatagaacgtttctctcatgaaattgtttttttgcttctgttctttgttgttgattttcacaaacaacaacaatcataataaaaggaaggggatgagatgtcaaagagaaatcaagcacgaaaagtagggagatttatgaccatgccgaatgatccgtttaaatatagttttgacagacttgaagatgtggctgatcatatcagcgacgttctgcggtgcccgatcaccatagaggatgttaaccacaagctgcttgcctacagtacacacagcgactgcacagaccctgcccggacgtctaccattattggcagaagggtaccggagaaggtgattaacaagctgtggaaagacgggacaattcctgctctcttaaaaacggaccagccgatcagagtcaagcaaatcgatgaagtcgggctgagcaatcgcgtcgctatttcgatttggaaaaacaagcaagtacttggcttcatatgggcgcttgagatccaaaaaacattgtccgatgaagatctgctgacattgcaaatggcagcaaaagcagtgaaaaacaagcttctcaaacttcaaatcagaaaaacgaaaaatgaagaacgcagccaagaatttttctggaaaatgctgaccggacacatccatcaggaggatgatatggcggatgggttccataagcttggaatggccgctccttcagagttttccgttatgatcatccgcataaatggcgagctgactgaaaaaatcgaacagcagctgcaatatttacaggaaacgacccagcaggtttacgtgctgctggcgaccgtagattccaatgaacttattatattaacctcacccaaaacagatcatccttttcaagatttaaaacagtttgctttaagtacgcaaaaacagctgaaggagcggtataaaatagaagacgtttctatcgcttttggcggaatatacaactctatttcttttgtctcccgctcctatcaggaagcattgtccgtcttaaaaacgaaggaacggttcgctgaagagaccaaacatcttttcagcttttctgagttaggcatttatcaatacttagatgtcttaaatgaaaaacggaaacaggcgggccattataattactcgctttccaaactggaacaatatgaccgggatcaccagtcaaatatggtagagacgctagagcgctttattgaagcggacagcaacgtgaataccgcttccaagctgttaaatatacacgttaatacgttgaattaccgactcaagcggatcagccagatcgctgaaattgatttgaaaaatgtgaatcaaaaattcaccatctatttagatatcaaacttcggcacatggatttgtgaaatttcacaaatccatgtttttttattttcttaatcaaacaaagaattttccaaaatatcaagctacactaaaaatatcacatatacaggaggagacagatatgatcataggggttcctaaagagataaaaaacaatgaaaaccgtgtcgcattaacacccgggggcgtttctcagctcatttcaaacggccaccgggtgctggttgaaacaggcgcgggccttggaagcggatttgaaaatgaagcctatgagtcagcaggagcggaaatcattgctgatccgaagcaggtctgggacgccgaaatggtcatgaaagtaaaagaaccgctgccggaagaatatgtttattttcgcaaaggacttgtgctgtttacgtaccttcatttagcagctgagcctgagcttgcacaggccttgaaggataaaggagtaactgccatcgcatatgaaacggtcagtgaaggccggacattgcctcttctgacgccaatgtcagaggttgcgggcagaatggcagcgcaaatcggcgctcaattcttagaaaagcctaaaggcggaaaaggcattctgcttgccggggtgcctggcgtttcccgcggaaaagtaacaattatcggaggaggcgttgtcgggacaaacgcggcgaaaatggctgtcggcctcggtgcagatgtgacgatcattgacttaaacgcagaccgcttgcgccagcttgatgacatcttcggccatcagattaaaacgttaatttctaatccggtcaatattgctgatgctgtggcggaagcggatctcctcatttgcgcggtattaattccgggtgctaaagctccgactcttgtcactgaggaaatggtaaaacaaatgaaacccggttcagttattgttgatgtagcgatcgaccaaggcggcatcgtcgaaactgtcgaccatatcacaacacatgatcagccaacatatgaaaaacacggggttgtgcattatgctgtagcgaacatgccaggcgcagtccctcgtacatcaacaatcgccctgactaacgttactgttccatacgcgctgcaaatcgcgaacaaaggggcagtaaaagcgctcgcagacaatacggcactgagagcgggtttaaacaccgcaaacggacacgtgacctatgaagctgtagcaagagatctaggctatgagtatgttcctgccgagaaagctttacaggatgaatcatctgtggcgggtgcttaattcacaataagcttgcagaaagatttctgcaggcttttttattttttaaaaggaaaaaagagaccatttcacgaattatgactatgaagttgatcataaaggaggattcatatggctgttcagcaatatggcgtgttaaaaggcatagtattagacatgaagcgggaaacagatgatgacagtcctcatttccaagtcaaaatgctcggtgaagagaatacgtattacaggtgcgccatcaatgtgatgtccagttctgaggaatctgaagtattgtatttggctgacgatcagtttgattcgggctcaattaccatccttccgaacatgccgtatggatatacaaggatcaatgaagcaaaccgtgaagtggcactggattatgtgcggggcaatttgtttgacccgcgggaaatgaagcctttgcctcatgaaatcacgggacctgataatgatttaaatgattttattgaaacctatatgaagaaagcacaagatgagaaaacgccggtttatatattcggttcaaaattcggccctgaacaggctgcagataaaatattcggctttaccccgactaacggaatgcacaatatccatatgaatcaagggaatgcaatggatacccgctggaaaaaagacaacggctcttggcatgacgggggtattctgattcagtttgcagatcagtgggccgctgtgtttttagcgtttttatcccaatcttggtgtaccgatgaaaacggaaaccctgtcagagattgtgatcatacccaaacgtctgcgtaagatagaaaaagagactgcggcaagcagtctctttttgataagattacacattttcaacagtctttaggctgtttggcctcatatcgctccaatgcgattggatatagtccaaacaagcttcacgccctttttgctcatgaacgactgtccagccgctcggcacatctataaaacccggccatagggaatattggccttcttcattgaccagcaccaaatatgtgccatccgcattttcaaaaggatttgccattctatttctcctcccttatttattcaactcttccaatttgacagcgagaaccttgccgatttgagccagaggttcaggctgacataaatctttatgacggcagtcgatgtcgatttgttcaatctgtccgttaatataaggcttccacgagtcaggttcaatcgggtcaaaccattcaggaatgattgttgatctgaaaaacaaaacatttccgcggaaggttttcggcttataggaacctaaaatgccgacagaatttacatacgtattcttcaaatttaaaatgaccgtttcatccaggctcgcaagcgcactgccgtcacggcgaagaatctcaatcgccgcttcaaaatctagcggtttttcccctaagctgtctggatcatacccgcctaacgccagaagggcaataagcgcttcctcatcatccggtgcctcttttataggaaggaagtggttcggataggcgtccagcatcaccaacagggatacttcttctccttgattttgcagctgggtagccatcgcttgaacgacattcccgcccagggaccagcccagcagatggtacgggccttttggctggaccgttcggatttgtttaatgtaatcggcagccatgtcatcaagtgttttcggaagctcctcgcgctgcccgattccccgtgcctgcaagccgtagatcggataatctgttcctatattggtcatcaaaccggcataacaccagctgagcccccctgccggatgaacacagaataaaggaggcttgtctccgcttgttcggagcggcagcagaacgtcaagagcgctttggcttgatcccatttcaagtctttcagcgagcccggctacagtaggtgcttcgaacaagttgccgatgctgagttcaacgccgagcgcttcacgaatgcggctcatgagctgtacagcaagcaaggaatgtccgcctaaatcaaagaaacggtcatcaatgccgacacgcggcaagtgaagcacctccataaagaggtcacagagaatttcttcctgcggcgttctcggtcctcgtcctgtcactgccgctgcgaaatccggagcgggcagcgctttacgatcaagctttccattcggtgtcagcggcaattctttcatcgtcacaaaggcagcaggcaccatgtaatccggcagtctctcagcagcatatctgcgcagttccgccgtatcaaatgtttcttccgaagggatgacataagctgctaaccgtttatctcccggctgatcctcacgaacgatcactgccgcatcttcaagctgcggatgctgaacaagcgcggcttcaatttctcccaattcaatccggaatccccgaattttcacttgatggtctgcacggccgacatagtcgagagaaccgtcagcgcggaggcgggccacatccccagtgcggtacatccgggtgcctggaggaccgaacggatcagctatgaagcgttcagatgttaaaccaggccggcctagataacctcgtgctaaccccgctcctgatacatacagctctccggcaacacccggcgggaccggctgcaggcgttcatccagcacgtatacaccaagatcgggaatgccgcagccgatcaagctgtttgcccgtaaagctgccatgcttcggtctaattcgatatagctcacatgcaccgtcgtttctgtaataccatacatattgataagctgcggtctattttcagggtggcggttgtaccaatcctctaaacggctgagttcaagcgcttctccgccaaaaatgacatagcgcagactgagtgcctgtccgagatccggctgttcccgttccgcctgcataaactgatagaaagcagacggtgtctggttcagaacagtcaccccctctttgacaagcaggcgcagaaacgcttctggcgatctgctgacgtggtgaggcacgattacaagacgtccgccatgcagcagaggaccccagatctcccacaccgaaaaatcaaacgcataggaatggaacatggtccagatatcacctgagctgaaacggaaccagtgctcggtcgctgcaaataaacgtgttacattttggtgaggaatcatcacaccttttggaacacctgttgagccggatgtataaatgacatatgccgtattcaaaggggaaagcggctgagtcctatccttattttttggattacctgcagggtacgtgtttagtttctctgccagctcgggatcatccagcacgattttcggcacgttttcaactggcggaatgtgatttgcagctttagtgttcgtcatgataaacgcaggctgtgcatcttttagcataaaagcaattcgatcagccggataatccggatcaagagggagataagctgccccggcctttagcaccgccaataggccgacagccatttccaacgatcggggcagtgccaatgccacaaattgctccggcccgacaccttcactaatcatcattcgggcaagccggtttgctctttcattcagctctgcatagctcagttcctgattttcatatacaacggcaatggcatcaggacgtaaagcagcctgcttctcaaattgctctggcaaacatgcgtgcggaatcttttcagatacactttgccaatcagtcaccatgctgctgtgttcctctggcgcaagaatatccagatttccgatttgctcgtcaggatcagactcggcagcctccaacaggcgcatcaatcggtcagcaagagcctgagcagtttcccgtttgaaaagatcagtgctgtattcaagcagtccttccattccgtttggtgtcccgtcagcaaggcgatcttcactaatttccagcgtcaaatcaaacttggcagaaccgacactgttgattcgcaggctgctctccatatcaggaagatgcagttcagcgtccggtgtgttttggaacgcaagcatgatttggaataaaggatgcgtcgcacgcgaacgagccggattgagcacctctacaagtctctcaaacggcagatcctgattgtcataggcggccagattcacttcccgtactctgtctagaagctcacgaaagcttgggtcaccggacgtatcagttctgagcaccaatgtattaatgaacagccctacaagatcgcccagcgcatcatcattccgtcccgcgatcggactgccgatcggaatgtcggtgcccgccccgagccttgtcaataaagcggcgagaccggattgaagcaccataaacaggctcaccctatttgcgcgagccagctcctgcaatcgcttgtgaaactcgggctcaatacgaaaatgaatcgtatctccatcatgactcggctcagccggacgtgaataatcggttggcagttcaagctgatcaggcaggtttttcaaggtttctttccagaaagcaagctgtccggcaatcaagctatttggatcatcctcgtttccaagcagttcttgctgccaaagcgcatagtctgcatactgcacagcaagaggcgcccattcgggagatcgtccgtggcagcgagccgcataagctgtcccaaggtctctggtcagcggtgttaaggaccagccgtccccgacaatatgatggacgagaagaagcagcacgtactcgtcaggaccgatcacaaaaagctcggcacgaaaagcaggttcagctgcaagatcaaagctgtagcgtacagcttcggcaagccgatcagaaagctccttctcagcaatttcagtaacatgtaactcgggacaggctcgatcggcatctaaaatatgctgataggatgtcccctgtgattcagggaagatcgtccgaagactttcatgacggcagacgaggtcataaagtgccgctttcagcaatccttgatccaactcacctgacaaacggacagcaaccggaatattataagtaggactcggtccttccagacaatgcaggaaccatagccggcgctgggcaaatgagagcgggatcttttcaggccgctcagctctctgcaaagcgggacatgcactctgcgccaaatcaagatgggcagcgagtccggctactgtcggttcgtcaaagagcttggcgataccaagttcggctcccattacctcgcgaatgcggctcatcagacgggctgcaagaagagaatggcccccaagctcgaagaaactgtcatcgataccgacgcgtgccaaaccgagaacctctgcaaacaagtcacacaatatctcttcctgaggagtccgcggggcccgatcactgacagatgtgctgaagtctggtgccggcagtgctttccggtcaagcttgccattaggtgttaacggcagctcgtccatctccacaaacgccgacggtaccatataatcaggaagactagcccccatataacgacgaagctctgcagtatcaatagcagcatcagcgactacataagccgccaatcgtttgtctcccggctgatcttcccgtacgacaaccgcggcctgttcaatgtgcgggtgattggcaagcacggcatcaatttctccaagttcaattcggaatccgcgaattttgatttgatgatccgcccgcccgatataatccaaagacccatcggcgcgccagcgggcctggtctccggtccgatacatccgagttcccggcggtccgtatggatctgcaacgaagcgctccgccgttaaatcaggacgatggaaataacctctggccaagccggttcctgcaatataaagctctccgacaacgcccggcggcaccggctgcaatccattatcaagcacatacacctgcgtgttccaaatcggtttcccaatcggaggaacgcccttcagcccttcttcaagaaaagctgcggcagaccaaatcgttgtttcagtgggaccgtataagttcgtgactgaacaatgaaggtcttgaagttcctgcaaaagaccgctcggcagcgcctcgcctcctacaagcactctaagcccccgaagtttctcaggttcactcgttaccaaagcgtgccacagtgtcggtgtcgcctgcataatgttaatatcgaaattttcaatcatttgagctaatgcctgcggctcacggatcgtttctttctttgcgatcacgatttgcgctccgctaatcagcggaagatataactccaatgctgaaatatcaaaagcgacagtcgtcacagccaacagcctgtcttcttctcctagagaaaatgcctcctgcatagacagcagaaaattgcttaagcttttctgtgtcacaacgactcccttcggtcttcctgttgatcctgaggtatagatgatatacgcaggatggtcaagcgaaaccgatacatcctgattttccggcgaatagcgttttataatctcctgtgtaacagcctgatcaagcacaagctcaggtacagccaggtcatcaggcagactggctgctatttcctcagtcgttatgatgcatgaaggtttcgcatcctccagcatgtaagaaatgcggtcggctggaaactccggatcaagggggagatacgccgcaccagtcttgagcacaccaagcattgaagccaccatctcaggggaacgcggcagcgccaaagcgacaaattgctccggaccaatccctttttcgatcaacagacgcgcgaggcggtttgcctcttcattgagctttcgatagttgacttgaatgtcatcacacatgagagcgatacgttctggcgtaagaactgcctgcttttcgaacatgtcctgaaggctgaccagcttctcggattttgccgtctcattccatttagaaatgactttttctttctcctctggcaacagaagctccatttgcccaatcagcatgtcctctccggcagaagccgtttgcagcagctgcaaaatacgctgctgatgaagcttaatatcagactcactgtatacctcgggattcgcatcaacatcaattcgcagcccgctgccgtctgttctgtcatatacattgattgatagatcatcaacaggaccggctgaaagattatgcgttgtgccccggacgccggcaaagtcgagaccgtaatcaaacggcataagattgatttgagggccaaataatctatgattttctcctatcaatttcagatcgcgcctaagctcttcatggcgatacttatgatgtcgccgaatactgcggatttcccgggaaatttgctgaatcagttcagaaaagctcatcgaagagcttaccgtcagccggagcgggagaaggttcatcaccatagccggtacattcagtgacgcggaccctatccgacccatcatgggcaggccgagcacaacatcctcagagccggtcatacggtgcacataaacagctgacaccgcaatcatgacttcatgccagcttcctgagaaatagcgcgccgcttcttttaacgcgtttacatcagacggaggcagatatgccgtatgacgaagaaaactgttagatgttcttggcgcccgatcagccaagctcacaacttcaggtgcatctgcaaaacggtccagccagaattgacgatccttctcatactgctctgatccgcgataatctgtatcctcctccaaaatggcctggagagacccaaaggaacggcttttagctgtttgtccttttataagggcagtatatgtacttgccacacgctgggctatcagggaaaaaccgaagccgtcgatcgctatatggtgaatgcgctgataccaaaagaaacgatcaggcccggcaataaacagagcttcattgaacaaaggggcataccctaaatcaaccggctttgctaaatcagctttcatccagtttaatgctgttttttccggatcaggctcagagctgacgtcaatgacgtgcagctgtacatccggagacgggtttatcatctgccaaggcccgtccatattttcaccgaagcggacatgcagcgattccgcttccttgatcacgtgccgcaaagcttcttcaaaaagagcaatattgactggtccattgatttctatatattccgctgtattgtagattggattgtccggatcaagctgctgagcaaaccatatgccagtttgcgccccggtcaaagaatattgaagatcttttgtatcaggcatccgtttgtttaccctccttttataaataatccgcgtttggcagcacttgctggctgcgagttgtgagcaatttctgccattcttcgatcgttgggcgttcagccaattccacgaaagtcacctctgccccttcacggcgccattgttccaccaatgtcatgatccttaccgaatcaagaccacgatcgagcaaatcctcttgatctgtgatgtcttccggtgtttcttgtagaagctcagcaatttgtttacggatattctcacatgtaaacacgttctttttgccagtgtttgctgacgttttttgaacgtctgccggcgcattctgcagctgatcaagaagactgtcagtcatcacggtaaacgcacagcgtccagccgcatattccagcgccatttgatgtttttctaatgaaaaatcagcaactgcatctcccacaaaaaaggctttaatatcctccataaatgcttcacatgctgtaacaagacagccgatatgggcgtaaattcctgtaatgatcagctgatcgcgtccctctttgcgcatcatttcaagcagattcgttctcttaaacgcgctgtatctccattttgtcagcacaagatcatcatcctctggtgccagctcggttataattttctcctcataaggaccgctgtttaatcccgggccccaaaagtctgtcagcagcgcacggtcatccggattttggcttcccggctgtgcggtatagacaacaggaatcccaagctgaacacattgattcttcagctttcgtatattcgctgaaagctctgttaccggagacgctcccgctgtgaaagcatcaacaaaatagttttgcatatcgtgtattaacaagacagcccgattcggatcaggcacccatgatactttgttttgcggcatatcagatgctgtcggcatttgatacggctgaatggcaggtatagccatatgaacacttcctctcaaattgttgttttattttttaaatcctgcaagaagcttctcggaaatggcttcacggagcgcttttttgctgacttttcctactcctgtctgcgggaaggattcgacaaattcaactcgatcagggattttatatgccgccagtccgcgctctctcaaaaatgctttaagctctgcggcttttggggcttcatcccggggaataatgaacacacaagatctttcgccaagaaattgatcaggcatggagaccattgccgcatcatggacagccggatgcgccagcagatgattttctacctcttcagccgcaaccttttctcctccacggttaatttgatccttcgcccggccttcaacgacaatatagccgtctcgtgtcagcctgacgatatcacccgtacggtaaaaaccgtcctcagtaaatgaagcggcgttatgctcttctgccttatagtaacctcgaattgtatacggcccccgcgtcagcagatggcctgtttcaccaggttttacgtcgcgatcatgatcatcccaaacacgcatttcatcatatggagacatcggttttccttgggtgttgacaatgatctcctcaggatcatccaatctcgtataattgacgagaccctctgccattccgaacacctgctgcagcgtgcagccgaaaacagcttttaccctgcgcgcggcttcagcactaaacttggcaccgccgacctgcagcacttgaaggctggataaatcatcacggcgtgaggatgccgcatccatccataccatcgcaagaggcggaacaagagcggttatcgtgaccttttcccgttcaattaaaggaaatgcgtcatctggacttggagaaggagataataccactcttcctccagcgtataatacgccgagaacgccgggtgagctcagcggataattgtgtgccatcggcagcgcggccaagtacaccgtgctgtggtcgagccagcagacctccacactccgcttcaggctgtatatgtagtcatcgtgggtcctcggaatcagtttcgatagcccggtgctcccgccagaaagctggaggaacgccacatccgatgatttgacttcaggcagttttacaggttctgcatgcaaatcctccagcggtaaaaattcctctgcctcacctgcgacaatgatgtttttcaaagtcggcagcttgctttgaacctgtctggcaagcgaacggtagtcaaaaccggaataagcgtcgggaatgatatatgcagccgcttcagcaaactcgcaaaaatatgtaatttcactgcttcgatgagaaggcagtgcgaagactggaagcgcccccagacggaaaagcgcgaaaatgacttcaaaaaactctttgatatttggcaactgcaccacaacacgatccatctgttgaatgccgagcttttgaaatccggcagccaggcgatcagcccttgtgtcaagctctcgatagctccaatgggtgtttccgcatgtaatggcaatgcgatcaccatatttggctgcccggtcccttaacaaatctccaaacgtctcaccggcccagcagccgttctttcgataggtctcagctaactcatcaggccaaggcgtaaatcctttcagcatgttgtatccctccagcaattcattctgttcatatgtgatccacgcccattgcccgcagcattgtccgaaactttgcggacgtctcctgaagctcgtcctcaggctttgaaccggccacaacaccagctccagcatacaggcggagtgagcgttcttctgcttctgcacaacggatggtcacgatccattctccgtcaccggcatcgtcacaccatccgaccatgccggtaaagaaaccgcggtcaaatggttcaatgctgagaatcgcttctcttgcaagatcagtcggtgttccgcagacggctggcgtcgggtggagcgccgccgccaattcaagtgcggttacagacgggtcggaaagctctcccttaatcacgctggacaggtgccacatcgtttccgttttgatcagtgaaggcttctccggaacctccagcgtccggcagaaaggtctcagcgctgccgcaaccgcgtcagcgacaaccgcgtgctcatgaagatcctttgcggaagaaagcaattcagctgcccggcgctggtcttcaacaggatcattactgcgcggtcttgagccggctaatgggttggaaacgacctgtgttcccatccttgaaacgagaagctccggacttgctccgagcaatgttctgcggggagacgtttcctcctgactggacacgtctgcggcaaacgtgtagccatgcgagttatgctgagccagatggcgaagcaattcatccgtctgaatcggttcaggcgatgtcaaatgcagcgatctggacaggacgattttgctgagtgttccatcggcaatgcgtgccagcccttgttcaacaccatttttataatcctcaggttcaggaacaggctttatgtggtatgtatgcccagcctgctgttccttttcctcatgatcaaattgaagcggtcctgaccagcgcacttcttcaggtacaacgagccgcgctgcttttacttgatcaaaaggaacggccccgacaacaagcggccggctttgccctgattgttttgcctgacgtaacgcctctgcaattcggccagaaagggtttccatttggttttgcccgtctgcctccggtacaatttcacatatgcctttcgctaacagtacacgatgaggagacgctaagaaaaaggcgcccggctgatattcatgaagcaaatgctccgcttttgtttctgttataacgttttgatccaacattctcatgaacctcctttaaattcagttacacgcctaaggtcgcgccgccatctacgcataaattatgcatcgtaatatgccctgcctggccagaaaccaaaaagagcaccgcatccgcaatatccgaaggcttggctagttttttgagcgggatccctgttttaaatgtctcaagtgatccttttatgacttgctccgctccattctcgtcggcccataatgaccactgcatgtctgtttccgttgatccgggagatacaatgttgcagcgaatattgtattctgcaagctcaaggccaaggcatttcgtaaacatcacagccgcagcctttgaagacgcatatgccgccatagatgttcttggtacaccggcagcattcgatccgactgttacaatcgaacccgatcttcggtccatcatatatttgctgactgaacgcgaggcgttaaatacgccagtcgaattcactgagaacgtcgcctcccattcctcatcgctaagcgaatggatcagtcccgggcgaaggacacccgctacattcactaaaatatcaatcggccccatttcacgttcgatgcgcgccgtgatctcgtcaatcgccgcgctgtctctcacatccgcaggaaaagcttctgcatggcggccttctgctttgaggctgctcacaaccttttccagcttttcaggattataatcaactgccgcaatatgtgcgccttgactggcaagcgtccgcgcaacagcttcgcctattccttgggcagcccctgttataaaagcaatttttccctctataccctttgcattcatatcatcaattcctttcttcgctctaaatgccaaacagacatccagcgaaaaagactgctgcgccttgaaaaacgcaatctattgataatgattatcattatcaattataaaaataatcatatccaaatgtcatgtgacagtcaaatataatttcagtgacaaatatttttttaaaggcaaggctgagtatgtctcagcccattgatagatgcggtccgtcagggtgaagcgcaaaacgcagcgccctgctgaccaaaacaggaagaactgaaatatgtccttctcctgaaaactcgcaaaattctgcccgtataccttgttcagataaaacggccagccgctcataaagctcccttgcattatcattcatccggcttttatgatgctgctctaattctcctgcggcaagcaggatattgataggctgattgtttttcttggtgagagagacgaaatggtccgttttcttgagaataaacggtttattccaatgaatggacggacttcccgcgatatacgtttgaaacgcatcgggctttgttagcagcacctgcagcacgaaaagccctccgagcgaatggccaaagattgtttgtctttttttatcaatctggtaatctcgttctatctccggttttaaatcctcttcaataaatctgaaaaagccctccgctccgccatgctccggccattctctgccgtcgggcctttccggcagcttcgattgggctgttggcattgtaaaatcccggtggcgtgctgaggagaacggctccgctgtctcatagccaatgccgacgatcactgcagggatcaccccggttttttcgggtcggcgtccctgtattcgaacggcttccgtcatcgttccgaagacagaattggcatccagcagataaatcacaggataaccagcgggtggcggcggcgtactaggtttcgagataaaaatgtgataggtacggttttcattgcgtgaagacatcatacgcacttccgtaccaggaatcgtaaatgcgtttgatgtcccgccatttgtccggtctgttgtttgttctttcatgcagtacgacattcctctccttaaactaaaccgcaatgtatgataatgattttcactatcaactagacacctcaaataataggttttcttccaaagaaagtcaactttttcccgaataaaaaaggcaccttgatcaaataaggtacctgcagactatcaatatggaagtaaaaacctaataaagatgcgtattgtcctatttgaaatagaaccttaatcccatgtaaacctttgattttgccaagggtcgcctctcatgtgatagccattccgctcccaaaagccagggtgattttctttcgtaaattggatgccgcgcagccacttggcgcttttccaaaaatacagatgcggaaatacaccccgcagcggaaagccgtgttcaggggttaaaggttcgccattatgcgcataagccagaagggaagtttccgctaagaaatcatcaagcggcagattggtcgtccagccctcttcagcatgtaaaatgacgtagcccgcttcttcttttacacccgctttttccgctatatcacaagcccgcacgccttgccacacattatcaagccttgaccatcccgtgacgcaatgaatgtcgtttttcgattcataccgtggaaaggctttgacatcttcaaagcttagcagcatcggatggtcaaccaaaccgtatacttgaagattccatttcgtcatatcttcgtaatatgggacatctccggtatgaagcacaggaaatgaagtggtgacgttttgatttggcggcactcttccagattgatcggactgtcttgtttttccgaaatacatatgggcctcctttttgttaacctaatttaaaatcatgttgacaatctttttgttctttattactctatgattgtgtatgtcaacctaagggggaacaacgatgaaacaacgtaaacttcgtgcgggagatatggcgctgattggcatgttcgccgcacttatggctgtcggggccaacattacatcagtagcaccctttttacaagtagccggcattccgctttcgatgcagccgtttttctgtctcttggcagctttgcttcttggcagcaaacgggcagcgattgccatgattgtatatgcacttgtgggattggccggagcgcctgtgtttgctcaattttcagcaggcttcgcaccgtttgcagggaaaagcggcgggtttattatctcatacattccggcagcatttgcagcgggatggtttttagaacgaaacattcagccaagtaaaattcgatttctcattgcttcacttatcggaacggcgatcatgtatctcatcggcactacctatatgtatcttgcactgaagctgtggattcatacgccagtgagctacggcacggcttggggctttatgatttggtttatggtaaaagatacagcgctggctgtgatactgtcgtttatcgcaccagcaatctaccgctctattcataaagcaaccggctttaacagaaatcacatatcatctacgtaaaaaccgttctattggacggtttttttatcataacgagaaaaggctccccagtaaaggggagcctttttcctataaaacaagcgctgcaatccagccaaagatgacaagcggaatattataaaatataaatgtcggcacacaagtatcccaaatgtggtgatgctggccgtccgcactcaaacctgaagtcggcccaagcgtactgtcactggcaggtgaaccggcatcgccaagcgcagcagcagccccgataatcgcaatcgttgccatcgggctgaatccaagctgcatgcatagaggcacgaaaatggttgtgataacaggaatggtcgcaaaagaagatccgatccccattgtaattaataagccgacaatgagcatcagcaatgcgcccaaggactgactgtgtccgataaaaccagctgacgttttgaccagtgactcgacatctccggttttcgtcaatacgtttgaaaatccggctgcaacaagcatgacaaagccgataaaggccattaaaaccattccatcagtaatcagtgagtccgcttcatcacgcttcatcacaccgctgacaaacagaacaatcagaccagcgagcgcccccataatcattccttctactcccaaagtctgagataagtaaagctggacgccgagtgacacaacaatggctagaaccgcgataccaatactttttctcgtatatggcgatgcttctgcacctgaaatgtcttttgtttcatattgtttcggtttacggtatacgatcactgataaaataaggccgacaaccatacctgcaactggaataatcagtgcgtacggaatatcagcaagcggaacgtttaacccggcatccgccatattgtccttcagcatgccttggaagatttggccgaaaccgaccggaagcaaaatataaggagccgttaagccaaatgtaattacacacgcgatcagacggcggtccatttcaagttcattaaagattttcaaaagcggcggaatcagcaccgggataaacgcgatgtgaaccggaacgacgttttgcgaaaaacaagatacaattaaaataatcagcacaatcagcaccttagacagtgctttttttcgagaatcttctttatttccgattaatttaacggaggcttccaccattgcgtccggaagacccgttttcgtcaaagcggcggcaaacgcgccaagcatggcatagctaactgcaacggtggcatttccgccgagaccgtctgtgaaagctttaaccgtttcgccaagaccgagcccgcctgttaacccgccggccaaggcgcctataattaatgcgataacaatattgacacgcagcaggcttaatacaagcataagcaggactgcgatgacgactgcattcatgatgatacccctccaaaaatcctttagtttgctaatgtagtagataaataaagtacgaacgtatcgtatcataaccgatccactttagtcaactaaagatttcggaagaaaaaatccctgccgcatcatacagcagggatttttcattactcgtttttatcttcttccaatgtaaatcgctccgcaagtgtagccagtgttcttgccataacgccagtagccccggccggtccgaagcaggttgctttattggcagtcgctgtgcctgcaatatcaaggtgaacccaaggtgttgactcagcgaattcaccaagaaacgttcctgccataatcgcatgtccctcgcgtcccggtgaattgctgagatccgccatttggctgcttttcacgcgttttttatccttctctgttatcggcagctgccagatcgcctcgccgcactcttgtgcagcatcagctacctgctggtaaaagctttgatcatttgtcattgcaccggttgtttctgttcctaatgccacaacgacgccgccggtaagcgtagctacatcgacaagaactgatgcgccatgctgtttcgcgtatgtaatgccatctgcaagcactagccttccttcagcatccgtattaaggatttctattgtttttccgcttaaagatacgatcacgtcatccggcttcatggccccgccggagatcatattatcggttgatggaataacgcacagcacgttttgttcaggacgaagctctccgatcgtttccatagccccgagaaccgcagctgctcctcccatatctgatttcatgccaacaattccagatttcgttttaatggagtagccgcctgtgtcaaaggtaattcctttcccgactagtccgacgacgtcttcccattcctttttgccctgatatttcaacacaatcattttcggcggttcggtggagccttggtttaccgcaagtattccgcccataccgagctcttccatctctgatttctccaatatctcacactcaaaatcatatttcgccgcaagctcttcagcatacgaagcgaggtcagtcgctgtcagcatgtttcccggcatattcacaagcgttctagccgaatttgtcccttgtccgtatgcctggccgacgcgaagccctgcctgcacttcctgtgtatcttcatctgttacaacatacacggcttcaatttgtttgtcaggctcatttgatttatgcttataatcctgcacctcataggaagcaagcaggcagctctcagctaaagcatgagcggcatcggctggaggcacgtcttccgaaataaacgtatcaagcagaacagcagtttcttgttttcgatctttatgaatggcttgaaaaacatgagcaaaacgttccttcgcctgttcaaacgaataatttgcttctctccccaggccaacgaaataaatccgtttcatacccgcagaagatggagggaatacttttgatacttgattcggtttcgcagagacatcaccctcttttaaaagctgtgtcagatggccttcgagcatttcatcaatttccaacgcttttcctgtcagctggcttttttgaaaaagcccgacaacaagggtttctgtatgctctgattgttgaaccgcataaaacatgaggcttacactcctaacgtaatgggtatttgtaatgaacaatggtataataggaaaaacattctttccactatacttattttaacaaacaacagtctaagacttgcttttttcttttgaaacacgaaggatttttcaaatagaaaggatgtcgccgatggaacttttaacgaattttcctttattatcaagcctggccgcaattatttttgctcaggtcatcaaagtgcccatacagtttatcgtgtccagaaaactggactggtcgctggtcacaagcacaggcggcatgcctagctctcactccgcagcggtcactgcgctttctacaggcgtagccttggagcatggattagactcctcactctttgcggtttccgccattttcgccgtcataaccatgtttgacgcaactggcgtcagacgtcacgccggtgagcaggcaacagtcattaataagcttgttattgattttaaccgtttcgtaaatgaagcgaaggacttccctaaggctgcagagaaagaaaagcaaaaaaagctgaaagagcttctcggacatcagccgatcgaagtctttttcggaggattaacaggtattttactgacattggtactcgcttactttttcatgtaaaaaaaacgctcctgctttcgctggagcgttttattctttcaccgttttatattgatttctgaacacttgcaaagattttgtttcattgagcttctcaagctcatcctcggtaatctttcccgttccctttttaatcacatatacatcaagggtttttttgccccattcattgtatacatctttgactgtctcaaagtacagatcaaggcggtttcccttaatagctgatcctgtgtcggccacaactccgagaccgtagttcggaatgaataaaattgttccgatcgggaaaacggacgggtcagcagcaaccgtggaatataaatcccgtttcactttcacacctgaatatgtaagcccgtataatggatcaccgggatttttgcccgtcgactcagctcctgctgtgtagcctgttgctgttactctttggactggatattcatcccaatcaaatgcctcttctaacggttttgttttatcctcagccgcggacgtggtttgtgtttgtttctgctgcaatgcttttaatctcagtcctgcatgcttcaagtgcttttcctgatgttcctgcacccattttgacaagtccttcgcttcaattcctgacactgataaaaatgtcgtgccaaatgcaagcagaaataaacaggtcatcagcaaacgtctgatcatattcaacatcattcacctctcctccgaatcattgttcccaagtggagagagcattattcaaaatggtgaatgagctgaacgcataaaaaaagctttctttagaagaaagcggcatttaaaacatttgatatcctctttttctaagcatgttgatcgctataccggacacgatggcgccggccaaaccgctgactaaaatcagcacatcagcagccgctaatgataagacacgatgaaacaggctggcaaaggattctcccggcgactggacatagctgatcagcttttctttgctgataatgaaaaggcatacaattggataaatcacagccataatccaagacattctcagcagcatgtttaataagaaaccgattccaaaaaacaagacaaaaaacaaaacaattgagatgattacgactggcagactaatcaacctattccacccccctgcgttgtttttagtgtaacgcgggggctgaaataaagtcaacggctggaaaaagaatgactgtcttttcctgtcccctggcaagacggacaagtctctgaaccgccgagaatcaattgaaaatatcctttccctgaacaaaatgggcatgcatgtgaagcggttgtcgttgcagttttcatctaatcatcaccctttttcttaattttctgataatataccatatcaagctgtcaacaataaagtcagatcatgtgacaaatcttttgatgtaagcggaaacatacttgttttcctctcgttctctttttattttggcgttttttaataaagaaaacccgcttccgcgggtttttagaaaaacttgaacttgccttttttcaatgtcagtccgagtccgccaatcataaacagtgagcggttatcaatgacttttttcataaacgaagcgggcgtgcctttcagctttctgccataaacaaccccaaccgcgttatgctcgccaagagaagccactgttcccttaatgtccggcttgaattcctcaagctctccgcctttaataagcctgccaaggtttttagcgaccgttatgccctgctgcattgcaatttgcgcagtcggcggatacgggcgctctgtatcttcattcataaacagcgagctgtcgccgagaataaagacattgtcatgtcccggggcgcggagatcagggttgactttgactcggccgcgcatattctcaaaaccggcttcctccacaatcggatggccgcggacacctgccgcccatacaacggtttgcgatttgatctgctctggttcttcatcttttttgccgactctgactccttctggtgtacattcttgtacagccgttccgatcttgaactcaactccgttttcctcaagataatgtacggcgtaatcaacaagttccggatcaaagcccggcaaaacggtcggcgctgcttccacacaaatgatgcggacaaggcttctgtcaacgtcatattccttacagagctccggcacgcgagcagccagttcgccaagaaattcaattcccgtaaatccggcaccgccaacaacgatcgttaacctgtccggccgtttttccgcttccgtattgtaagtcgcaaactgcagctcaatatgttcccgcagcaggcgcgacgtgttgatgttggcaatcggaaacgcatattcttttaagcctttaatgccgaacgtttcaggcacggcgccgagcccgatgactaaataatcgtactgcaattctccattcgcaagcacaacttttttctcatcaattttgattgcctttacggtatcctgtacaaaattcacccgtgactggttgattacatcttttatctgataacggcagcggtcatgatggagcgtacccgcgctcgcttcatgcatccatgtcgtttcataatgataattgtgtttatttacaagcgtaatgtcagcatcattcggcccgacatacttcgtcagccttgtcaccgtcatcaatccgccatatcctgcacctaaaatcacgattttgggcttattcaatgccatcacatccaccttctctttttttgcttttgttagacccataataaaatcatcatttgtgttagcttcagcttattggcgggattttatgaaatatattgaaaagttttttgtgaagtccttacccgtagcactattatcatgtttatccggctggcccaagaaacattcagaaaaagatcatttcatttggttattatcgtagcggcctgcggaaatattttcaagaacggatgggcacgttagatccttacgattttttctgctgactcgtcaatttgaacggcaatatggtataattaataacaattttcatttaggaggcaattttcgtatgcgagaggatacaaaggtttatgatattacaattataggcgggggaccggtcggcttattcaccgctttttacggcgggatgagacaggcaagcgtcaaaattatcgaaagcctgcctcagctcggcggacagcttagcgccctataccctgagaagtatatatatgatgtagcgggattcccgaaaatccgcgcgcaagagcttatcaataacctaaaagagcaaatggcgaaattcgaccaaaccatttgtctggagcaagcggttgaatctgttgagaaacaagcggacggcgtgtttaagcttgtaacaaatgaagaaacccactactctaaaacggtcatcataactgcaggaaacggcgcattcaaaccgagaaagctggaacttgaaaatgccgagcagtatgaaggcaaaaacctccattacttcgttgatgatctgcaaaaattcgccggcagacgcgttgcgatccttggcggtggagattccgcggttgactgggcgcttatgcttgagccaatcgcaaaagaagtatcgatcattcaccgccgcgacaagttccgagcgcacgagcacagtgtggaaaaccttcatgcgtcgaaggttaatgtcctgacaccattcgtccctgcggagctgatcggcgaagacaaaatcgaacagctagtgcttgaagaagtgaaaggcgaccgcaaagagattttagaaattgatgacttaatcgtcaactacggtttcgtttcatctcttggaccgatcaaaaactggggcctggacatcgagaaaaattccattgtcgtgaaatcaacaatggaaacaaatatcgaaggcttctttgcagcaggtgacatttgtacatacgaaggaaaagtcaacctgattgccagcggcttcggcgaggcaccgacagcagtgaacaacgccaaggcttacatggacccgaaagcccgcgtacagcctcttcactcaacaagtctttttgaaaataaataataaaaaaaggagcttgtgtctgcgacacagctccttttttatttgaagatatttatataattcaatgcagttcctacaaccagcgcaatcacaagggctgcgactacccagatcattgccataataatgcggtcctgaatcttttgggacttcggtgttttttcttcgttttgggccatcttattcgctcctttcccatgtccatgccataaagaaagcctggtgctgaacgaccaagctttgctgaacgtatatcattcgcgttttgatccgctctctaagaccattcgttaaaactatgatacctaaactcaccctgcatgacaagcttcggcacttgcaccacacctgccagcaaatcataatgtttgacatcctaaataaaacagagtacattatataaggcgaacatttcatatattatacttttaaatattcgtttttaggagtgaaaaccatggaaaacgtatttgattacgaagatattcagctaattcctgcaaaatgcattgtgaatagccgttcagaatgtgatacatccgtacgtttaggcggacatacatttaaattgcccgtcgtccctgccaatatgcagacgattatagatgaaaaactagcgatttcattagccgaaaatggctacttttatgtgatgcaccgatttgagcctgagacacgaattgattttattaaagatatgaacgcacgcgggttattctcttctatcagcgtgggcgtcaaagatgaggagtatgaatttgtccgccagctggcagaagaaaatctgactcctgaatacgtgacaattgacattgctcacgggcactcaaatgctgtcattgaaatgatccagcaccttaaaaaacatttgccggacagctttgttattgctggcaatgtcggaacgccggaagcggtcagagagcttgaaaatgcgggagcggatgccactaaagtcggcatcggaccgggaaaagtatgtattacgaaaatcaaaacaggcttcggcacaggcggctggcaattagcagcgctgcgctggtgtgccaaggctgccagcaaaccgattatcgcggatggcggcatccgcacccatggcgacatcgcaaaatcaatccgattcggcgcaacgatggtcatgatcggttcactatttgccggacacgaagaatcgccaggccaaacgatcgaaaaagacggaaagctttacaaggagtacttcggctcagcctctgaattccaaaaaggcgaaaagaaaaatgtcgaaggcaaaaaaatgcacgtggcgcataaaggctcaatcaaggatacactgattgaaatggagcaggatcttcaatcttctatttcttatgcaggcggaacaaagcttaacgccatccgcaatgtggattatgtgattgtgaagaattccatttttaatggggataaatattaatcataaaaaaacgccaagtcagcggttctccgcttgagttggcgttttctgctacttcttcagcaaagtaagcttatatttgctttttgagtttatcttccatcagttctgccatttgttttgcatttggattttcttcattttgcaactgttcaatgacgttcatataatccgtttcatttcggttctggcttaatttatatgccgcttgaatgtcttccaccttaatcttaaatccaacaatacctttcaattcactttctaagagttttggagaaagcttatcccataacacaggattgtcacgatgtttttcgtatttctccaacatgattgttaattcttctgctaattcatctttctctaacatacttgcttttccatacatgtggacagcctgataattccacgtcggaacattttcgcgcgaataccaggaagaagaaatataagcgtgcggtccctgaaacatcacaagcacatcttcacaggcttcaaacgttctccactgaggatttccataagcgaaatgccccgtaatatagtaatgatcgtcttttttattgaatcctaacggcaaatgtgtggcaattggttttccttgttctgttgtgacaaccgtaccaaaggagttttcttgtacaaaattccaaatttcttcagcatttgtgactttaaaatattttggaatatacatcatcatccacccttcgaaaaatattatatgagtgttttagccatgattaaatccgtttgttcttcatcacccatataaaatgagtgggcgccggtctgaacaaaccccattttcttataaaaggcaatggcattttcatttttttcccacacacctagccaaatgttctttttattacgttccagcgcaatttctatcgctttattcagcagatgtttgccaagcccatgtttttgaaagctgttctttatataaattctctcgatttcaagtgattcagcacccatttcttcagactgagcatcatcgatattgacctttacatatccagcgatttcatgatcaaagtaaataaaaaagaattgcgaagacatattagataactctttttccagctgctcagtgttaaatgcgctttctaaataggctttcatattttcaggtgagttctgttctttaaaagtgtcattgaatgtttcaatactcaattgttgaagtgtttgtaaatcttcccggctgcattttttcatttttacactcattgttcggattcagcccctttatttaaaattcaattgtcttgtgtcccttttatatatttaaacacggaacacatactgaccttgttaccattccaaaaatcttcttcatcaccaactccctatcgtgattttgttgtaaatgcaataaaatatactccgcattaaatatatcgtaactttgctgtatttacaacaaaaatcaaacaacaaagcagcgtttctcttgccgaagttcccggaactctctgcatcatttccccataataaaaacgcctcccttaacgatgatttatcgctaagaaaagcgtcagtaatagttgctatccgtttttagtgcttagcactcttcaggcttgcctgcattcgttgctgttctgaacgaagaaccgcagccgcatgaagcgatggcgtttggattgtcgatggtgaagccgccgccgagcatggattgtttataatcaatcacggtgccgttcatgatgtcaaggctttctttgtcaactagaacagtgatgccgtgctgatcaaacacactgtctgattcactcttttcatgctcaaagcccatgccgtaagaaagtccgctgcagccgccgcctttgacgcctacacgcagaaacgcgttttcttcttcatgctctttcatcatatcttttatatgcaaagctgctgcttctgtaattgttaccgggttgctcatcattatgaacctccttttaaaaaccggttgctgtcttttattataaacatgatcgttccaattctcaaacaaggtgttttacaagaaatagacaccctcacaaacggtttcagccggccctgtcatcattacatggccgttatctttccagtttatcaccaaatccccgcctgctaaatgcaccgtgatgtcttgatttcgctttgatacgccgtttaatacagatgcgactgccgctgcacatgctcctgtcccgcatgcctgagtaatccctgatccccgttcccagacgcggaaatgcaattcttgttcattcacggtttcaacgaattccacattgatgccttccggaaatctcggatctttctcaatcaccggccccagtgtcgttaagggtgcctgttcaatgtctgcgatcggaaaaacgatatgcggatttcccattgaaacggcagtgcctgttagttctacttcaccaaatgccatcgtttcattgattgtgtgctcttccccgccgtcaagcataggaagctcggattttgtcaagcgcggttcgcccatatcgacagtgaccacattcacttttccgttttcgacttgaacctccgctttcacaagcccggagagagtttcaatcagaaaagatgtttcctcaaccagcttatgctcatatgcgtattttgcgacgcagcgcaggccgttgccgcagtttttcccttcagacccgtcattattaaaaatccgcattttaacaggcgcttggtctgatgggcatatcaggatcattccgtcggatccgatccctgtataaacagaagaaacctgaattgcaatctctgacagtttttcttctggaagctgttcttcaaattgattcacataaatataactgtttcccaggccgtgcattttggtaaatcgaaatgagttcataggtgcctccaactttttttctttttcttagtataaaagctattataagcggacacaatacaattatcccccgtttttcatacataaaagctccttgcactgacgcaaggagcttttatcgtttatataaacatgccggcaatggctgcgctgagcagattggctaatgttcctgcaagaacagccttcaggccgagacgtgcgatatctgaacggcggctgggcgctaaaccgccaagcgtaccaagcataatcgcaattgatgaaaaattggcgaatccgcataacgcgaaactgataatggtagcagttttcttagaaaactcgccgatgtgcgaaccgaagttagaataagcgacaaactcattcagcaccaatttctggccgatatagcttcccgcctgcaatgcttcatgccaaggcacgccaatcaaaaaggcgataggagaaaacacatagccgagaatggattctaatgttacgccttttaaaccgaacaagccgaaagccccgccgagaataccgtttactacagcgattaacgcaacaaacgcaagcagcatcgccccaacatttaacgcaatttgcagtcctgttgacgctccctttgcagctgcgtcaatgacattggctgcgccttcgccttcatccattttgaaatcgctttttacggtttgcgttttttccgtttcgggtataatcaatttaccaaagactagtccagctggagcagccataaagctggccgccagcaagtactcaatcggaataccgagaagcgcgtacccaaacaaggtagatcccgcaactgccgatagaccgctcgtcataatcgtaaacaactcagagcgcgtcagcccggcaatcaggggtttgatcactaacggagattctgattgtcctacaaaaatattggcagcagccgccagagattccgttttgcttgttccaaggagcttcgacaatccgccgccaatgacacggaaaacgagctgcatgattttcaaatgatataaaactgcaatcagtgctgagaagaaaatgataacgggcagtacacttaatgcaaatgccggactgtctccgacctttagaagcggtccaaaaataaaactgatgccttcattcgcatagtcaatcagaagctgtacacggcttgaaaaccataaaaaaacagcgcgtcccgcttcccatttcaacacgatgtatccaaacgccacctgtgtgcataaaccaacgatgacggttcttatcttaatattgcttttcttttctgaaaataaaaacgcgatagcaatgatcgcaactgcgcccagcagcccccacagaacattcatgaatactcgtacacctcttaaattttatttaaaaaaatatcttttatacgataacaataatattttttgatgtctacacatttttttagttcttttgtacggcaaaataaaaaagggcctgtccaggcccttttctttaaaacattggattttcttcaataaaggtatatatattctcaacaagctcagcaggcgtttcacccatgacgacttctccgtttaccagagcgaaaagcgattccatacatgtcccgcagtagcttaagcagccatattcaaggacatcaaggttgggatccttctccaaaatcgcccgggcttcctgagagccgtgagccagattgctgacacaaaattcaatcattggattcatgcggtttcacctcacatatgtccattatcgcgaatttttcactattcgtcaaagacaacggatgattcaaaatttattatcgtaacatattatttctcaaataacgttttactaatttgtgttttcaggctaaattgtaggttattttgaaactattattgtgattttagatcaaattcgatataattctagatgttattttacatagttcgtattttcttcaatgtatctatcatactcttcggattaaaggggaattcaaatgaaaaaattggtcttgatcggcggaggttacgggaacatgcgcgttcttcatcgcttattgccaaaccagctgcctgatgatgtttcaatcacgttaattgacagaaatccttatcactgcttgaaaacagaatattatgcccttgccgcaggcacaatttctgaccatcatatcagagtgtcattcccagagcaccctcgcctggatgtccaatacggtgatatcacatcaattgatattgtacaaaaacaagtgctgttccaagatcgtgaaccgatttcttacgatgacgccataatcgggctcggctgtgaggataaatatcacaacgtgccgggagcgcctgaattcacctacagtattcaaaccatcgatcagtcccgcgaaacctaccaaaagctgaataatctgagcgctaatgccaccgtcgccattgtcggagcgggcttaagcggcgttgagcttgcaagtgaattgagagaaagccgtgatgacctgaacattattttgttcgaccgcggtaatctcattttatcaagctttcccgagcgtttaagcaaatatgtgcaaaaatggttcgaagagcacggtgtccgcattattaacagggcaaatatcacaaaagtagaagaaggcgttgtgtataaccacgatgatccgatttctgcagacgccatcgtgtggacagccggcatccagccaaacaaagtcgtcagagacttagatgtggagaaggacgcacaagggcgtattgtattaacgcctcatcataatcttccaggtgatgaacatctgtacgttgtcggcgattgcgccagtcttcctcatgcaccgagcgcccagctggcagaggctcaagcagagcagattgtccaaatcttgcaaaaacgctggaatggagaagccctgcctgaatcaatgccgcagtttaagctgaaaggcgtcctcggttcactcggaaaaaaagccggcttcgggcttgttgctgaccgtccgctgatcggccgtgttccgcgtatgctgaaatccggcttgctgtggatgtataaacaccataacggttaatgatagagaagaaccgctgatcaagtcagcggttttctgtatacccatgcttctccatttcctcataaacgtcttttaattttggattgccttcaccgacaattttgtcttctacaagcacaagcggataaaaatactcgtcatttctgattttttccgcaagctctttcgcatgttcattgtcaggcggctcatgaatatcgatgtactgcatctcaaaaggctgatttggatattttcttttcagcgcagcctcaagccactcgtatgtatccttggctgtcggcatatttacacagctcgcacaaacgttttctgccccgtacacgcttagcatgactggtttcatcacttgtagacgcccccttctcctatgtaagtcctttcttttaagtatacagagcctaagggcgtttttatagaaaaaaaccgtttttgtgttgaagtctgaatgtgctataatagggaaagcaactttgcaaaccaaacaatagatttttattgttacactgaatataatggttttatgacgacgaaaggagcgaatgtcatgactgaagttgaaatgaaagaacaggtgcaggaagtactggacaaacttcgtccgtttttacttcgtgacggcggtgactgtgagcttgtagacgtagatgaaggtatcgttaagcttcgtcttctaggcgcatgcggcagctgcccaagttcaacaattacgttgaaagccggaattgagcgcgctcttcttgaagaagtgccgggtgtcgttgaagtagaacaagtcttttaataaagcagccaggctgatatttgatcagcctggcttttttattagagatgttgatcaaaccatgagctgatataattcaggcgcttgatccgctgtcttgggtgtccggtgcgtgataaattgtgcgatgcattcggaaaacggacaagcttggtttccttgcccatttttttcagagcgataaacagctgctccgcctgctcgatcgggcatcggtcatcccgctcgccatgcagtatcaaaagcggtgtctccacgtttgctgcgtattttaaaggagaccggtcccagagcttttctgtgtcctcaaacatgtcatgctcaagctgccagtctgtaaagaaatagccgatatcactgacgccgtgaaagctgatccaatttgatatcgagcgctgggtaacggcagctttaaagcggttcgtctgcccgacgatccagttggtcataaaacctccgtagcttccgcccgtgacaccgagccgcttaggatcaatatgcggatctcgtttgatagcctcatccacagcctgcatcacatcgtcataatcctttcccccataatctcctctgaccgcattcacaaattcctgcccgtagccgtggcttcctctcggattgatataaacgaccgcgtatcctttcgccgccagcacctgaaactcatgaaaatatgtatgtccgtacatcatatgcggaccgccgtgtatgttaagaataagtggatatgttgtctcaccttccatttgtgcaggcctcatcagccagccgttcaccatcacgccgtcttctgtagcatattgaatctcttcaggtattgatatcgtatgctccctgacaaacttgtcattcgcgccagtcagctgtttctcttcctgtccaagcgggatactgtaaagctcactcggtctgtccggctttgtcacactggcaataaagtgctgttcatcaggtgaaagagaaaagctattgatgtactctttttccagacgaatcggatacacaaggccttcaatcgaaatataatagatgcccgtactgccttgatctgtgccgatgacataaaacccttggctgtcctttgtccaaatcgggcgctgttcagcaccaccgatcaatgaatctccaatcagcgcatccgctaaatgaacgtccagcatctcagtaagacatgtgaggcggccttgttcgatatcatagagccacgcctttgagagcgtagcattcttatattccttttcatttccaagcaaagcaagataccttccgtctggtgaaaatgagcttgatccgaatgagccgcgatgaggtgtaacctgcttaagatctccagactccagtgacattatgtaaacatcatgcggcttgctggcatcatctgtttcagttaaattagctgagaaaacaagccatttgccgtcaggagaaaaagcaggatcaccatgatcagctttgtgacttgtcagctctttcatctcacccgactttacgctgacaagcacaagctgggcatacgcacctctcgtcagccctttgccgtcccgtttgtaggagaggccttgcacttcaacaggttcatagctgtcctgctctgttttttctcggtcatcaatgctttccccctctcccaaactgacagtgaccagaatcgattcaccgtccggggaccatagcggctttgacacgccatatgggatatcagtcagttttcttgcttctccgccttcagtgctcatgatataaagctgtgccgcatcgccttctcgatcagaaataaaggcaagcgtgcgcccgtccggagaccatcttgggtcggtgcttcgcttttctccatgtgtccaaggaacagatcctcccgttttcgtttcatagatccatatatttgatgtatacgaatctttctcttgatttacttgtgattttacatatgcggcacgggtaccgtctggggcgtattgaggatcggtcacagagacaatcgctgtgatgtcgtctgcggttatcagctttttcatattcatctcctcctttttacatgtatttcgtttttctaaataaaaactcctttatctccagcaaaaaaaagcgccctccgctgacgctgaggaacgcttggcatgatctatacactttttacttgatataaaggatttcgctctattatacttccctctttcggaacggtcaaagcgtctacttcacaatgagggaaatgaagcgcgagctgttcttttagctcttctccctttcctttttcggtcatgacgagaatcgttgggcctgctccgctgagagccgttccatatgcgcccttcatctcggcgacgtgctctacttttgacagctcaggcacaagcatcgcccggtacggctgatggaacatatccttcttcatgattttcccgacaagcggccaatccttggacatgatcgcagcaatgaggatattgctgacagcacttgcttttacggcatcggcatatggaaactccttcggaagcacgtctctcgcgtctcttgtcagcacttcataaaaaggaatgacaacgactacgtcaatgtcagcattcgggacgcggatcatttgggtctcgtcatcctcatgcaggccgatcacaagtccgccgacgagagaagcgccagcattgtccgggtgtccttcttctagactcgctaaatgcagcttgtccgcttcagacagctttaagccgcataattcatcagccagttcaatggccgctacaatcgctgcggcgctgctgccaaggccgcgtgcaagcgggatgtcgctccacaccttcacatggacaggaggcatttcttttccgtacaaatctgcggtccgtttagccacttggtagatcaggttatctgtacccgccggaattccggcgactgtttctgtttcagcctcaaaagaccatttgtcgctttcaaagacggtcagcttcaaatatctgctgagcgccattccgactgaatcaaagccggggcctaggttagctgtgcttccgggaacagtgacagagaacagcatgtcggcttcgttcatacacgggccgctccttttacatattcaaggatgctgtcttcatcagtcggcaatgtgacaggcttgatttctgaaatgtcgaccgctgtgttcggatctttcagtccgtttcctgttaacacagctacgaccttgctgcctttcggaatttctccggatttcacctgtttcagcactcctgcgatagacgcgcaagaacctggttctgcaaacacgccttctacacgggcgatcagctgatatgcgtgaaggatttcatcatcagtgacttcgtcaattttcccattggattcctcggctgcctttacagctttgtcccagcttgccgggtttccgatacgaatggctgtcgctattgtttccggattttcaatcacttcattgcgcacgattgccgccgcaccctcagcttcaaagccgcgcattttcggaaggcctgtgccgtttttctcatgatattccttgaagcccttccagtacgcagtgatgtttccagcatttccgaccgggatcgctaaaacatcaggcgcttcccccagctgttcgcacacttcgaaggcagcagttttttggccttcaatgcggtaagggttgactgagttgacaagggcaatcggtgatttctcacagatggaacggacaattttaagcgcatcgtcaaagtttccgtcaattgcgataatctcggctccgtacatgacagcttgagcgagttttccaaatgcaatttttccgttcgggatgatgacaatgcatttcatgttagcacgggctgcatatgctgccgcagcagcggaagtgttacctgttgacgcgcacataatcgtgtcattgccttcttcttttgcctttgccacagccataaccattccgcgatctttaaatgatcccgtaggattgacgccttccgttttgacatgaagctcaattccgagctgctcagacagcttcggcaggtgaataagaggtgtgtttccttcatgtaaagttagcgccggtgtttgatctgttacaggtaaaaattctttatattgatggataagtcctttccacattagctccaaccgttcccttctacacgatatgtgcttttgacttcttgaacgacttccaaatcatttaggttttgcaggatatcactgaaatcagcttctgatgtatgatgtgtgacaattacgatttcagctaactcatcatggcctttaattggcagctgaaggattttttcaaagctcacgccccgctctgagaacacagatgtaattttcgagaatgaaccaacctcatcttttacatgaattcttaaaaactgctgtgcataaatgtcagacggcgatttcatgtttttctcatattgcggtccgacaaagctgttgccggttacacctaggcgcatatttttcatgacagcgacgaggtcagaaacaacggatgtcgctgtcggcatgcttccggctcccggcccgtagaacatcgtctcaccgacagcctcgccgtatacataaacagcgttaaactcattatgaacagcagaaagcggatgatggtcaggaagcagtgtcggctgtacgctgacctcgattttgctgccgtcacgctgagcaatcccgatcagcttcattgtatagccgaggcgtttgctgaagctgatgtcctcgtctgtaatttgggagatcccctttactttgacgtcttccagatccacgttcatcgagaagccgaggcgcgccaatatcgccattttccgtgcggcgtcaagcccttccacgtcagaagtcggatcagcttcggcaaaaccgagatcctgcgcttccttgagcacttcctcgtatgggcttttctctttgatcattttggttaagataaagtttgttgtgccgttcacaattcccatcatttttgtaattcgatctgatgagaggccttcctctaacgtgcgcagaatcggaatcccgccggcaacactggcttcaaagtagatatcgcatccattttccttcgcttcggcaagcagctcggagccgtacacagccattaagtccttgtttgctgtgacaacatgctttttcgatctcagcgcgtcgaccaaatattgttttgtctgttcaacgccgccgatcacctcgatgacgacatcaacatctggatcatcaatgacatcatacacttctgtcgtgagcacttccttcggcaaatctacttctctctttttctctaaatcttttacaagcactttttttatcgtaaccggacagccgacctgatgcataagcttatcctgatggtcttgaataattttaacgacaccgcttccgacggtacctaaacctaaaagccctacacgaatcgctttcaaaaaaactccacctttcttttgattgtcctcttggaaaagacaattgttaactcaacacagacatataagttacaaacattatataagcccgctcctgttttgacaagacatcattaggctgaattttgcgaatgtaaacgcttaacgcattgatatgacaagattctttattttctaattatttttgtcagattttctcctcaccttgagctgcctttgccgagccagctgacgcgtggaacaaacagcttctgcgcccgcatattcatgaattcctgcgctgtattgagaaattgttcataacgcccacagtcattaagaatgaagtcaagctgttcttcaaaataatgcttttctgattctgatgacatgtaatagctttctacgatttcaaaataatgaagcgggaaaagcagacggctgtataaaaggcgtttcgaaaatgaagacagcggtgtgacttgctcgtattcctgtaaaaagagaaagccctgctgattaaaatcttgtctgtgatgcaaaaacgtatgcctcatatattcagccaaatcacgggaagcgtggtcaaacacccaatccgccggaatcctgatcaatgattccggtgaccatgtatgcctttccatccgctgatggcatatcgttcctgaatcagcggcttggggcttgtcatccagctcagtgtccactaaatattgtatcgcgttttctgacagtcctaaataatatggaaatgattcgatcatttttttatcgaatggctcatgcggaggggtctgaacctttctctgccaaaatgcttccagctgatcaattcgttttccccacagatccttccactggccgattcttccggccgccttcacctcatatggatatcctcggccttttcggtgaaattccgcaagctccgctccaatggagaacgccctgtttgaataagggggggccgccttcagcagagcgtacgtttttccctcatgttcaaatgtcagttcaccttcttttgtaaagataaaaaccgaaacgtatgggtcactttgttcttgtaaatactgactcatgtaataaagctccgccagctctgtttctgagaattgggaaacggggacaatcagaaagtatgaattaggcgtctgaaagcattgatatgtgtgctggtacatggaaagctgcctgatgtgaatgccgtatttttcttttattgtacctttcaccatgatcacctgcctgttgaattagggctcatcacatcgtagtcatacacagccggaattatgaatacatattttaatccgaagaaggcgcaagaaaaagtcgtaaacttctcaagcattttgtataaactagtaaaaaagattgggtgaagctgatgtcagaaaacgaacaattcagtcagatggaagctaaagcaagagcacggatgaaggagcgcggcgttgaggtatcagacattgccgagcttgtcttttttctgcagaaaaaatatcatccggatttaaccattgatgaatgcacgctgaacgtcaatcgtgttctcgcaaaacgcgaggtgcaaaacgcgattttaacgggcattgaattggatgttcttgctgagcagaaaaaattgtctgaaccgctgcaaacgatgctggaaatagatgaaagcctatatggagtagatgaagttctggcattttccattgtgaacatttacggatcgatcgggtttacgaactacggttacatcgacaaagaaaaacccggaatccttaaacgattgaatgataaatcaaccggtgaatgccatacctttttagatgacatcgtcggagcgatttccgccgcggcttcaagcagacttgctcaccgcgcgcggcatacagaataagggcacccttttagggcgcccttttttcaaatgtatggaatccattcagtcagagagtcaatggcgtgagtcggtttttccatatcgtctgtcatatgttctcttttcgttacgcctgtgtgaacgagcagcgtatccatacccgcgttaatgccggccataatatcagtggcgtagttgtcgccgaccatgagtgtttcagacacatctgtgccgagaacgcgcatcgcctgctccataataattgattccggcttgccgataaatacaggctgtacacctgtagatacggttaacaccgatgtcagtgagccgtttcccggcaggagccctctttcagtcggaatcgcaatatctccgttagtggaaataaagcgggcgccatttctgattgccaggcagccaacagcaaatttttcgtatgtaatggaacggtcgatgccaacaacgacaaaatccgcgttttctccgccaaatgtcaggccgttttcttcaatcgcctggcggattccttcctccccaatcacatacacagacgcgtcttttttctgctgtgcaatgtgctgggcagttgccatgctggtcgtgaagacctgctcttctgttgccggaatatcaaaagacacgagcttgtccgctacctgcttcggtgtgcgcgaagagttgtttgtcacgaaaagataaggaacgccgcgatctttcagcgttctgacaaattcacacgcctcctcgattttttccgtgccattgtacatcgttccgtctaaatcaattaaataccctttatatgttttcatatccaacactcctgtggctttccagttgttatttaaacgcggaaacaggtcctagctctgtttccaaatagcttctgatccgtttcgggaagtcctgaagagctgtttgatgcgccttgatcagcctgtaaagctcgccgctgtcagcgagcagatactgttgaaccaacgttttgcggtaggcgatcaattttttgagctcatcaccctctttttccgtgacaactttctcatcaacaagtatatccataatgtcgtcatagctgcccgggtcccgcataataaagccgtcaatcatgtcattgcctgtatccaaaatgcattcgattaacagatggcctatacgctgaagtgccaattccccgatttcagactgccagtctgtttgtgagtcaaatagcgccagctggtgctcgaagaaccctagtgttttttcgattttgcttctgtcaacaaaatacatgacagcatcccctttgtgtatatttattttctgatccgtttcaagacaaaatacgcacagccgaaattgcagtattcgtaaatatattcatctaatgtgctgattttcgtttcgaaggttgccttttgattctggtcgtcaaagaagcccttgagccttaactgaccgtatccccagtctcccacaatataatcgtatttatttaatatatcggagtagcgggctttaaaagcctcttcgttgaagccgtctttgaaattgtgcaccaattcaaattcggcattttgaataagaatcatgatctcacctcttttttcactcattcctatcataattcattgccccgtccccatcaattgctaaagaataaatcatgcgatttggctaccctacacatgaggagggattgataaatgaaacgaaccgctgtcagcctctgcctgctgaccggactattatccgggtgcggaggcgcaggattggataatgcccaaaatgtccggaatcagacgcagaatcaaaccaaacccattcatgtgtcggaccgcaacgaggcttttaacaggcataatgagaacgaacaatttggctatgtccgctatcaaaaagaacaatttgacggagaacagcagaaaacgccggtgatgaaccgggaagaaaccgctcacatgatatcaagtttaacggttcagctcccccatattcaagatgctgcgacattggtgactgaccgagaagcgcttgtcgtatacaaaaccgattctaaaaaccgggagctgaccgccgatcaggtgaaaaaaacagcggcttctgtgataccgcgatactatcacgtgtatatttccgataatccaaaccatatgcaatccgtcgaaaattacagcaatctcggctctggttcaagggatattagagagatcatgtcggggacgattcaagaaatgaaaacctccccgcaaggaagccctgtctcagagaatgaaaatgccaatggagaaacgcgtcaggacatgaaaatcgataggaatgacaaaaacgccagatgatctggcgttttggcattatgcttgtgcttgacgctttttagatgcttcgtttacttgttcatccgcatggtaagaggaacggacaagcggaccggcttcacaatggctgaagcctttttgcatcgcgatttcttttaattctgcaaattcatcaggatggtagtatttttggactttcaagtgtttcttcgtcggctgcagatattggccgattgccataatatccacgttgttcgccaagaggtcgtccattacttcaataatctcttcttttgtttcgccgagtccgatcatgatacttgattttgtcggaatgtcaggctgcatttccttcgcacggcgcaaaaattccaatgaacggtcgtacgtcgcacgcgcgcggactcttggcgtcaggcggcgaaccgtttcgatattgtgattcaggatgtctgggcgtgtatccatcaaggtttttaggttatcgtagtttccgcccatatcagacggcagcacctcaattgttgtgaacgggctttttctgcggatcgcacggacagtttccgcgaaaatgcctgccccgccatctttctgatcgtcacgcgcaacagccgtaatgaccgcgtgtttcaaattcataagcgcgactgaatccgctacgcgttccggctcttgcagatcaagctcagttggaaggcctgttttgacagcacagaaacggcatgctcttgtacaaacagaacctaaaatcataaatgtcgctgtacgtctgaccgcccagcattcatgaatattcggacactttgcttcttcgcatacggtatgcaggttgttttcccgcatgagttttttgagccctgtatagttttcatttgtatttaatttaattttaagccattcgggctttctgaggtgttcgtctttctttgccaattcccatcatctccaatatccaatatactcaatttctgacacgaaacattctgaaaacgagaaaggtgcaggttttagttctgcaacaaaaataatgtttttctaactaaagaaagtcttttctttagacactttaacataggaaaaatttctcgacaagggaagatgattactgacatttttaagccgggttgccgcaaactatgtgtattcaatatgaaaggagattattttgtgaaagttttgttatccgctcttcttctccttttgtttgcatttgagccttctgcgtctggaaaaaaactttcagatccagtgctgtcgaaacggatggaattatatcataaaatcgaagctgtgacgcagatcccttggtatgcgctcgccgctgttgatcaatacgaagaaaacgtgcggagcaaccggaaagatctgcctgaaaaggcgggaatcatcagcatctatatacccgatgatatctggagcgggcctgaaaacccgaatccgaaagacgatgcgccgttaagcattaaagtgtttgacggaatcggaatggatggcgatggagacgggaaagccgaggtcagcaacgatgaagatatcttgtatacgttcagccaatacttactgtcgtatggcacagatgaagacaacatccggatcgggctttggaattattaccggcgtgatcagacagtggggattatatctgaattcatgaagctgtttaaagcctacggccatattgatctgggcgagcatgcattcccgcttccgatcagaaccgattacagctaccgaagcacgtggggagatgcccgcggcttcggtggaaggcggattcatgaaggtacggatatctttgcccattacggccttcctgtcaaatccacatgttacggcgtagttgaaatgaagggctggaaccgcttcggaggatggagaatcggcatcagggacattaacaatacgtatcattattttgcccatctcaatgggtttgccaaagggattaaaacaggacaaatcgttgagcctggccaagtgatcggatcagtcggcagctccggatacggcccgccgggaaccgccgggaagttcccgccgcatctgcactatggcatgtacaaagataacggaagaaccgaatggtcatttgatccatacccgcatttgagggcgtgggagcgatatgaataccaaaaaaagaagtaacaaaaagccgcctcttcaacaggcggcttatttgctgcttttttctttttttgaatcggcaccgttttctttgctgctcggaagctggacagaaggcgtgacacccgagccgccgcttccattataaaactgcggcacttcgccctgcactgctttaatcgatacaggaacattatttgtgacgacagcggttttgctggcaaatggaatgatgaccttcactttaatttcgacaaagatgctgatatcaataagtgcgttatttatgccatacggcttgattttggttttgacatctgtaaaagcgtcaccgattaaattgaaccggaccgggattttcggcccgaggtttccaagaaggctgttgccggttacctgtcccagcggaatgttgatcataatgttttcactggcgccgctgtgtccggtatgggtttccatctctttcaaatgagcctgaagctgctttgtcacttttgttttcacactgtttacaacctgtgtattaaaatcgattgtcgttaagtttccgttttcatcagaattcatttgaaacatatctttcatattttcactgtcagacatatagtcctcaatcgaatcctggatcacctctgtcgctatacgcttcgtttccatctcgccgatgtccattaaaacaggtttgatcgagccattgatcatccaaaggctgaccgttgttgacaggataaaaaagacaacggacaggagcatcacgtaacggaaaggcaaaggtcctctcttgcgaaaagggccgcgatatcttggcaagaaaatccccccttacatatcacaatgtatgcttgtaagaggggacatagtaatagccggggccaatttattttatttcatcatttttaaaagcgcttctctgccgctcatgccgactttgatgccaagatcttccgcagcgtacgtgacggattctaaaggtgcgtctaacagctggtcaatggtgcggacaccaactgcgcgtcccgccacgatgccgcgctcctttaatttttcattcagcagcgccacatcaagcgcgccgcacataatgtatccgtgatcattggcgacggccataaaattcgttttgggaagctttactgtcacagctgtaaaaggctgtccttctatcatgatcggtgtcaggtttaccacgtcaaccactcccttcattcatcactttatgatgaagggcacagcttgttgtgggctgactgccttattgtgcaagcttccaagcaagcagatcccgcaaaaattccggcataaaatattctttttctgcagcgtcgcgaatcaacggaaacagtttgccgagcgtaaacatatcaagcaccgcaacggagtattgtttatgtttttcaatatcttccccgttcagtgtgatccgagtgacgtgggtgatcccgtcatcgagccgtttcgtttctacctcaacgccggcatacaccattttccccatcacttctccgcggaagccgagtcctttgatccggagctgctccatttgttcggaagcggcatggacaatggtttccttcagttcttctcccgtcaggcggacagccaccgggttgatcggatgcggacagatgcggtgcagatccagctttgtcacaggacctgcttttagcggaccgagaatgacacctgaattgaccatactgatgtccgtctcgcaccattcctttaaggcgtatgccaaaagcaaaggcagctctgattcttcaaaccacttcacctcagcatcttgtgcaagctctgcaacggcatcggacagtttctcctcggcttcacgttctttttcattgagaaacgctttagtttctgcggattctcctgtccattccgccatgttctgcacagaagccgttttgctgttgatgcttcgctgtacgctgtccaccgtgatttctacacagccgacataatgcccgtatttctcggcgctggccagcagtaccccattaaccacttgtccatcttcgagcaaatgatgggtatgtgattcgaggattacatcaatctcaggcaccgcttcagccactgcttgatcatcaagaatgcctaaatgtgacagcagaacgataatatcagcctgccctttcacttccagaatggtttcctttatgctttcaagggcatccgtaactgtccatcccagcttgtcatatacaggataatacggcacagttacacctaagaaagcaatggacataccgtttttcaatgatttgatatggtaaggcaccgcccaggacggacggtttccatttttatcaaacaggttagagacgatgacaggaaattcagcatgatcatataaggcagcaagctcttcatgcggaagcgtaatcccttcgttattgccgatcgccgctccatcaatgtgaaggcggtttaagagatcgacattcgcttttccgaatgtcgcctctgtcacgaattgaaaacgatcaagatgatcgccaatatcaaaaacgagcgtctcttcgccgtctgactgatgctcttttcttttctgctcgatataatctacaattttcggccagttttcaaaatggctgtgcaaatcatttgtatgatataagcggagcttctccttcataatatctctccctaatcgttcagctgaaaatgccttcataaatgagctggcagccgatcaaaatcaatacgatccgcatgatcataacgatcgttttcgtctgcatttttctgttgatggcggcgccaagctttccgccgaaccaagcgccgggcacaagcgcgagggcgtacagccaattgacgtgcccggaaatcatatgtgaaacagaccctgtcatagaagacaggaaaataataaacatggacgttgccaccgcaaccttcggcggaaacagaaataacagcatcatcgccggaaccatcagtgatccgccgcctataccgaaaagtccgcctaaaaaaccgacaacaaaggcaatggcaataccgacagaggcctgatatgagtacgtataaggctcaccggcatcatcctgaaatgtccggataattcctttgtgcgctttgttgattggccgggctttcgctttcagcattaaggataatgaaatcagaatcataaaaatgccaaaccaaacggaaaacgagtttgaattgaacagctttgacacgtaagccccgatcatgctgccgggacccgaaccgataaagaaaatgagtccgctcttataatcaactgttttatatttaatataagccaaagttgaagaaaggcccgtaaaaataatgaccaaaagcgaagttccaatcgcaacctgcggcgtcacatcctgaaacagctgcgtcactgtgcttaaaaacatcagagatggcacaatgacaattccgccgccaagcccgatcagacttcctaccgtacctgcgattaatcccagtacgaccaaaatcacaaacgacatcaatcaaaacctcttttctaaaataaatcgagctgtctcggagcaagtccgctgtactcgatatcaagcagttcaagcatctgcttgccattatccgcagcgtcaccgccggaattgttgttgaacaggacaaaaacatccttacattgctgctgcaattcattcaggtgctttttccaatcctccagctcctgttggttgtagcggtataagtacctgacctcccgccagtttttcccgccatcaggcttcatccagccctgcttgttgcgtccgtgaaacctgacgagcgttttgttttcatcggtcgcgcgcaacacggtcggaacgctgccttctccgatttgcggttcatcacagacactgtgaatccagccttccgctttcataaatgaaagcgtctgctcataaaatggcggcgagaaccaggaacggtttctgaattcaagcgcgcaaggaatatctcccatttggtgcttacaccatctcaaataggcgacattctccttcttgcagtcaaaccacggcggaaattgaaacagcaccatggcgagcttattgctatgtaaatatggcgttaaagacaccttaaacgcatcaaacatctcctcttttgagtcaaagggaatttcgccgcgctgatgccctgtcatgccctgatatgctttcacgataaattggaaggtttcgggcgtttccttcacccacttttcattattgcgcgccggctgaatcgcgtaaaagctcgcgtctaattccacgatcggaaaatgggaggaataggcctgcaattttttctggctggccgttttcggcggatagatgctgtcatgatccccccatcccgtcagtccgatataaatcacactcattcacctctcttccagtttatcacacgtgttttcaggtttcctcggaaatgctgttcatatggcgggaaaatgcctcacgcaaatgctgatattgttcctcattcgtatctaaaaacgcctcttctcttgaggaaggaatgtgctgatattcaataggcgcctgaaactgctcactcgtaaaatcgtacaccacaccattgatgctgttataaaaatgccagctctcatcgactcttgttttgaaaatcgtgccgccgaaatggtcttgaatcaccaatgccgtcacgccgcattggccgcatgacgggcattcttccgtccatttagagctcgaatggcgcgaccaggattgcttaagtatgtatttgacatgctccattgcctccgcctcctttaaaaaaagataccacgttgatgagattttaaaaactagaacggaggaaatcaaaaaacccggcggtaaaatccgccgggcttacgaaggaacgaccagagctccgtcaatttcagtgactttttccccatcattgtacacgcaccggcctttgctgtaagtggccgaaatgctgcagggaaatgtatgtccttcgtaaatgctttttttatgctttgcaaacatcgattctcttgtaacagtgtacggctccatgctgacgagcacgaaatctgcatcacaccccgcctcaagccgcccttttttctgaaggccgaatcgttttgcaggggccgccgctgtccattctgcgatggtttcaaatggaatctgatgctcaagcgccagttccagcattcctaataaagtgaactgcccgccgctgattccgccccatgataaaaacatgttatcctcccgcttcaaggatggacggcaaggggaatggtctgaggaaaccatgtcaatgtccccggcaatgagcgtctcgatcagcgtctcttttgattgccgtgaccggagcggaggcgcgcattttgcgacagagcccctttgccgtaaatcgtcatggctgaacaagacataatgcggacatgtttcaaccgaaacatcaagaccttcctgtttcgcctctctgatcagccggaccgctttcgccgtgctgatatggacaaaatgaaccggacagcctgtcaccttcgcatactgaatcgtgcgatacaccgcttcaacttctgcttcctccgggcgggaggcggcgtacgcatccgcatccacctttcctttattggccaaaaccatctgcaagtagcttgtgatcgcgtcgctttccgcgtggagagcgaggatttttcctgcagccgcgatttctgccatgcctttgagcaatgtccgttcatcaacagagcggaactcatcagtgcctgactttgataaaaacgctttaaacccgatcgctcccgcttcagccatcggacggatgtcctcgatatggcctggcacaaggccgccccatagcgcaaaatccacggcagatttttgcctgcctagctcagcttttgcgagaagatgctctgccgtcacggttgatggaatacagttgagcggcatatcaaaataggtagtgcaaccgcctgcggccatcatttgagaacctgtttcaaacccctcccaatcctccctgcccggttcattaaaatgaacatggcaatctatcacaccaggaaacacgtatttcccgtctgcctggatgatttccgtcccgcttgcttcaatgtcagaacctatctcggcaatgacaccgttttgaactacaatatcagcttctataacgccatctggcgtaactgccttcgcaccttttatcaccatatcgtaagccatattgatccccccatgtcaggatgacgattttccatgtcagtttatgtaacacaaccagttctattttcaacagtttactgctactatgatcgtattacatcagcaaaaccgctagaattcctattgaaaattattcaccttaaccaatgtttttatagaaaaggagaatgcgctatgaatattcttgatgtgatgaaaataccggcttttgaaaacgccaatttaatcgctggaaaagcaggaggggaaagagaggttcagcatgtcaatatgatggacgctccggatatcgtagactttttgcataagaatgaattgctcgtcaccaccgcctatcacctgaaggatcacccgcatcaattatctgaactgattcggcaaatggcaaaacgcggctgcgcgggcctcggcattaaaacaaagcgctatctggaagatatcccgaaggaaatcatcgaactggccgattcatatgcgtttccgatcattgagcttccggaacacatccgactcggcgatattgtgaatgccacactcagccatattctcgatatgcgttctaacgagctgcagcaagccatttacgcgcacaaaaaattcacaaaccacattatgagcggcaaggggctgcaatccctcctcaaaaaggtgtcagacatccttcagcttcccgtgctgctgcttgaccagcatgccaaaatgctgtctgcgtctcatcagatttcagttgagaccgaaaagctgaaaggcaccctgaataccgtatccgggccatttttcacttgtttctctacaatctcagatcagaaaacatattctgtcctgcctatttataatcacgaaaaaaactgcggctacctgctgatacccgacatggtgcaggcaggcgacaaaggattgatcctcacgattgaacaagcggccaacgtcatttcctttgaactgctgaaggaaaatgcgctgaagcagttcagccggcgggcccgcaatgagtttttcaacaattttattgagcggaccttttcttcagatgacgaaatcaaaaaccgggcgaaagaattcaagctgcgctgggatcaaaaatacatgtgcatcgccggcaaactcgatcgcaatgacgaatcaatcagctttacagaaaatcagctcgcttccgacagcgtattcgaatttcttgaaggtgaattatcagccttcccgtttccacctcacttctttatgaaaggaaatgtcggcattattctaatcgaggcgacagacagctggagtgaaatgcacgcctcggtgatcagctttttagaacagtttcaaacacaggtcagcgctcaatttaaacgaaccgtgtcctttggcatcagcaatatctgccaaaagctcattgatgttcccgacgctttcacagaagcttctgatgctctgcaatcggggcatttgtcaagaagcaccgcatttatccaggtgtatcacgccaaagatgtgcctgagcttctgcgcttgctcccagttgaggatttgaagaaattttacaactccacgcttcagagcctcgctgaaaaacagcaggaggatcaaagcctgcttcatacgctttccgtctatttagagacacactgccaaatttcagagacggcaaagcgtctgtacgttcatcgcaatacggtcatataccgccttgaaaaatgcgaagagcttctggggaaaagcttaaaagatcctgaaacaacgatgcgtttgcggcttgcattacgtatgcagcggctgatcagctaaagtttgttacattttcttacaaaacgaatcgtttttcgtcactttcagcaatcacacctgtctttttcagctactgtatccaatgacacccctcgaccggaacgatattatgttactaaagttcacatacagggagggactatagtgaaaaaaagatcgtttaaggtgtttacacttagcctgcagcatgtgctcgccatgtatgcaggtgcgattttggtgcccctgcttgtcggcagggcgctgaatgtaacaactgaacagctgtcctacctattggcgattgacctgttaacatgcggcgtcgctacgcttttgcaaaccttgcgcggaacatacatcggcatcgggcttcccgtcatgcttggcagttcatttgtggccgtcaccccaatgattgcaatcggcagcaattacggcattcacgcgatttatggttccatcattgcggccggtgtgttcatctttttgtttgcgcgttttttcggcaagctgactgtgttatttcctcctgtcgtaacaggtaccgttgtgaccttgatcggcctttcacttgttccgacaggtgtgaaaaatatggctggcggcgaaaaaataaacggcagcgccaaccccgaatacggttcgctcgaaaaccttcttctctctgtcggtgtccttgttctgatcttagtcctcaaccgctttctcaaaggatttgcccgaacactgtccgttctgatcggcatcgccgccggaacagcggcagcagcgatcatgggcaaagtcagcttttcttctgttacagaagcaccgttcttccaaatcccgaagcctttttacttcggagcccctgcgtttgaaatcggtccgatcttaacgatgctgatcgtcggaatcgtcattattgtggaatcaaccggcgttttttacgcaatcggaaagatatgcggcagacctttaactgacaaagatctcgtcaaaggctatcgagcggaaggaatcgccattctcatcggcgggctgttcaatgcctttccttataatacctttgcgcaaaacgccggcttattgcagctgaccaaagtgaaaacaagaaacatcgtcgttaccgcaggctgtatccttgtctgtctcggactgattccgaagattgccgcccttgcatctgccgttcctgctgctgtacttggcggcgcgaccgtcgtcatgttcggcatggtgattgcctccggcgtcaaaatgctcagcacagcggatctcaaaaatcaataccacctcctgaccatcgcatgctcaatcgcactcggcatcggcgccagcacggcccccgggatttttgctgaattccccgctccgatccggattctggtcagtgacggcaccatcaccggaagcctaaccgccatctttttgaatctatttttcagcttgcgcgacaaaaaagaattaacagcacagcaaacagaacttccggtattagaacatacactcgcattagaaaaagaggtgtaaaaaagatgaaggaacagcacaatgccttacagctaatgatgctggggcttcagcacatgcttgccatgtatgcgggagccattctcgttccgttgatcgtcggagcagcgatcgggctgaatgcggggcagctgacgtatttaatcgcgattgatttgtttatgtgcggggcggcaactcttttgcagctctggagaaaccgatatttcggcatcggccttcccgttgtgctcggatgcacgtttaccgcagtcggcccgatgatttccatcggaagcacttacggtgtcccagcgatatatggtgccattatcgccgcaggactgattgtcgtcttagccgcgggcttcttcgggaagcttgtccgtttttttccgcctgtcgtaaccggatcagtcgtcatgatcatcggcatcagcctgattccaacggcaatgaataacctggccggaggtgaaggaagcaaagaattcggctcactcgacaacgtgctcctcgggtttggcgtcacagcttttatcttattgctgttttatttctttaaaggctttatccgctccatagcgattttactcggtcttatcgcaggaacagcggctgcatatttcatgggaaaggtcgatttttctgaggttttggaggcgtcttggcttcatgttccgtctctgttttatttcggaccgccaacctttgagctgccggctgttgtcacgatgcttctcgttgcaattgtcagcctcgttgaatcgacaggcgtttattttgccctcgctgatatcacaaaccgcaggctgtcggagaaggatctggaaaaaggctaccgggcagaaggccttgcgattttgctgggcggcttatttaacgcgtttccctatacagctttctcgcagaatgtcggcatcgttcagctctcaaagatgaaaagtgtcaacgtcatcgccatcacaggaatcatactggtcgcgatcgggctggttccaaaagcagcggccctgacaacagtgatccccaccccagttctcggcggcgcaatgatcgtcatgttcggcatggtcatttcttacgggatcaaaatgctatccagcgttgaccttgattcgcaaggcaacctgctgattatcgcctcttccgtcagcttggggcttggcgctacaacagttcccgcgttgttttcatctctttcgggcgcggcctctgtcttggcaggaagcggaattgtgatcggcagtttgacggccattgcactgcacgctttttttcaaaccaaacagccgaatagcgcagacataaaaacgtaaaggaagatgccaatgttcacaatggatgacctgaaccaaatggacacacaaacactgacagacacacttggctctatttttgaacactcttcatggattgcggagagatccgcagcactacggccgttttcgtccctttctgatcttcaccgcaaaatgactggcattgtaaaagctgcggatcgcgagacacagcttgatttaatcaaaaagcatccccggctcggaacaaagaaaacaatgagcgatgactcggtacgagagcagcagaacgcagggctcggcaaattagaacagcaggaatacgaggagtttctcatgctgaatgaacactattatgatcgcttcggctttccttttattttagcggtgaagggaaagacgaaacaggacattcaccaagccctgctggcaaggcttgagagcgaacgagaaacggagttccagcaggcccttatagaaatttaccgaatcgcccgctttcgtctggctgacatcatcactgaaaaaggagagacgcaaatgaaaagaaccatgtcttatggcaaaggaaatgtatttgcataccgaacgtatttaaaaccgctcactggagtgaagcaaatcccggaatcatcttttgccggaagagataataccgttgtcggcgttgatgtgacatgcgaaattggcggagaagccttcctgccatcatttacagacggagacaacactctcgtcgtggcaacggattcaatgaaaaactttatccagcgccatctcgcatcctatgaaggaacgacaaccgaggggttcctacactatgtagctcaccgatttttagatacctattctcatatggacacgatcactctgactggcgaagacattccgtttgaagcaatgcctgcatacgaggagaaagagctcagcacaagccgcctcgtcttcagaagatcgcgtaatgaacgaagccgctctgtgctgaaagcagaacgaagcgggaataccataacgattacagagcaatacagcgaaatcatggatcttcagctcgtcaaggtgagcggcaactccttcgtcggcttcatccgggacgaatatacgactctcccggaagacggcaaccgcccgctgtttgtctatttaaacatcagctggcaatatgaaaatacaaatgactcatacgcttctgatccagcacgctacgttgcggctgaacaagtccgcgacttagcgagcaccgtttttcacgagctcgaaaccccttcaatccaaaacctaatctatcatatcggctgcagaatattagcgaggttcccgcagctcactgatgtcagcttccaatctcaaaatcacacgtgggatacggttgtcgaagaaatcccgggctcaaaaggaaaagtctacaccgaaccgcgcccgccatacggtttccaacattttaccgtgacaagagaagacgccgagaaagaaaaacagaaagccgctgaaaaatgtcggagcctgaaagcctgatgggaaaactgacaacccatattttagatttaacctgcggcaaaccagcggcgaacgtaaaaattggattgaagcggctgggcgaaagtattatgaaagaggtatacactaacaatgacggcagggtcgatgtccctctgctggctggtgaagagctgatgtcaggagagtatgtgatggaatttcatgcaggagactattttgcgagtaaaaacatgaacgcagccgatcagccgtttttaaccatcgtcaccgtccgttttcagctagcagatccagatgcacattatcatatcccgctcttgctgtcgccgtttggttatcaggtgtatagggggagttaagaaggaagcccgcctcaccggcgggcttctttttgcacttcaattaacttttgatcctaggacagtacttgaagtgatccccacacttagtgaaacaacagctagaataaacattcacctatatttttcaggataattgcctacgagaaaaataccctgtagtcctttcatttataaatcgaggtttcaaactaataagtcagctcttagcagccgagctcccttctccaatcctataaacagaccgcgttttttctcgaaaaaatactctgaagacaattgctgcgtttttaatagttttgataacgcgttctctcttacacctttagacaaaatattcattttttcttttttagacttaaatctatgtcgaaaataatcgttggcatatcttatcctatctccactaaaggaggtgacattatgggattctacaattctggtggatacagtggaaactctggttactcaaacggtttcgggagctccttcgctttgatcgtggtgctattcattttgttgatcattgttggagcagctatctttaattattaagtttaactttccttgcctccgccgtatccaacacctccctgtccgacagacgccataagaagtttttatggcgtctttgctatgtgttcactaatctttttgtaatccagaagctgtcaagttctacgagatttatcgtgtgttttcccacaacgcttctgcgtcttgatcgcgctgtctgactgaggctaaaaaagtccggcttttaaaagccggactcccgtctacccccgttcaactctcttctaatcctgcaagctgaccgcataatcccgccatacccggtacaccggcacaaattccccgccagcccttcttctatatctttgtcagaaggttgaggggtttcccgaaacaatgctttaagcgcaatgatcattcccggcgtacagtagccgcattggaagccgccttcttccaggaaagcggtttgacacatatccagctcttctttttgaagcccctcgatggttgtgatggaatggccgtctgcttgataggccatcgtcatgcacgcattggccagttttccgtcgattaaaatagagcaggctccgcagcggccgattccgcaggacacctttgtcccggtcagctgaaattcctttctaagcaggtcactcagatgtgtcgtaggaacggcagcaacctcccacgcctgaccattcacggtcatccggaactgttccttttttacaggaaatggcccggcctcttttatgtccattgcttcagcccctttctgtcgatcgcttcaagcaactcttctcttgaaattggcagcttgtttatccagcatccgaccgcatcatgtactgcctttacaatcgccggagtgatggcgattgttccgatttcaccaacaccgcgcggtccatatacgtctcccttcattaagtcttctattgcaatcagcttcatgtcaggaacatctttgattccgggaatcaaatagtgatcgagattttccgcagcataacggccatccgtcattttcgcttcctccatcagtgtgtagccgagtgccatggcagcgccgccttcaatttgacctcgatatccctgcggactgacaaccggacctgccgcaatagcgtgctcacaatctatcaatttgacatcgcctgttaacagatctacctccacctcaacggcagccgctccaaatgagtagaggaaatggccgcccaccacaggatcaggcgttgttggaaagtcaaaggccgtttcctctgccaaagggcctttttcagccagctccttatacgtcaccacgagcgcctttgtgtttttgtcacgcaagcctgcagcgccgggaataagattttccgctgaacagccgctccattctgccgcccgttttttcaactgagctagaaacggcttcttcaaacgctggatcgcgtgccacaccatgcttgtgccgcgggatgctgtggaggagcctgacttcggcacttttgcggtatccccaataacaatggaaatatcctctgcggcacaacccagctcctccatgacaatctgttcaatcgctgctagaatcccctgtccgcattcttcaaatccaaacgaagcagtgattttgccttcactcgaaagagacaaacggcctcctgccgcatccattcggccaaaccccagcccgccgccgtgcattgtaattgccgctcccgtgcctctttgcagatacccgcagttccggcttgtttttttaagaatgggagatttagatatggcattcaacacctgtgccgctccgtcagttggtgcaattcgatgctcaagcggccccaagtcatgcggttttctgatattttttcttctcagctcgagcgggtcgatgccaagcatgccgctgagacgatcgagatgggtttcgagtgcaaatgtgatttggttgccgccaaagccccgaaattcccccgccaccccgttgttcgtaaatactgatattccttcagtccggatattcggaatacggtacggccccgcggcatgctcgacagaaaaatcaagaacagccggtccgagcgtagcgtaagcgcctgtgtccgccacaattttcacgtcgtgcgccaatagatttcccgaatgatctgcacccgtttttatcgtaatcttcatcggatggcgcttaatgccagaacgtacagattcctttcgtgtctgatgaattttgacagggcgtccgcttttcagggccaaaagcgcagcatacggctgaatattcagctcatccttccctccgaacgagccgcccatcggacttgacacaattctgatcttctcttcaggaatatcaaaaatacgggcaagctggaaacggtctttatagccgtgctgggttcctgcatacatcgtaaaacccccgtcgtcttccggaacggctacacctccctccgtttccatatacgtatgcatctgccgcggcagctcataggtttcttcaaagactgtgtcagatgcttgaaacccttcttccacatcaccgtttgaaaaaaatgcgcggtgcaggatattcccgtcctcatgcagtctttgcgcattcggccgaagcgctttttctggtgaatccatgacttccagctctttatactcaacttgaatcagctccagcgccgcttccgcgatttcttccgtttccgcagcaactgcggcgatcgcatccccgacataccgcaccctgtcctcacataaaaccggctgatcagggatgacaatgccaaatcggtttaagccgggaacgtctttatgtgtgacgacggcctgcacgccttccattttctcagcttttatggtgcaaaccgacacaatctctgcatgaggataagcacttctcagcaccttgccatacagcattcctggaaagctgagatcggtcatatatttcaattcccctgtgaccttaccccttccatccggcctgactcttgacggtttgttgatgatcatttattcccctccctcagccatcagctctgccatgatgacgttggcagcggctttttttctgtatgccgctgacataaaaacatctgaggaaaacggcagctcatggataagtgttttgtacagctcatgcgggtcccaccctggtgccatccatttcgcttcgctgtccaataatctcctaggagtgatatcggcatggccagcggcgaggcgaatgctgccgtctttcaaaaaacgtccagctgcaacagcagccgctccggtaaaagcctggcgccttccaagcttgtgataaaatacacgctctccctccgcccgcgggatgatgacacgcgtgacgatagccgttctaaagtcttcctcactgagccaagcgccaagcggcagcctgattagctccttttgatatacgataagctcagcaccaagcacaagcagaagcggaatgaaatcaccgattttactcgctatgttgccgccaatcgtggcacggctgcgaatccccggtgcagcgacagcggaagcagcgtcactgaaacagctaagcgctctcttaatcaaagggttctttctgcattcattcagtgatgtgagccccccgatcgacacgtgggtgtcactggtgctgatccctcgcatttcgtcaatcccttcaaggctgacaaggtgctgtttcggtagagttcctttgtcccactgaagctgaaggagcgtgcttcccgatgcggcacacacatccggagcaagcttctctaaaagcgaataggcctcatcaagcgctgccggtctccataattgaatattcatccttgcttttgtcacttggccgttcaagacatcgccctccttaccatgtcatattcctcgggtgtatcaatatcgtccaactcaccgctatcctttgcctccaaaaccgctcctgctccaagctgtccgcttttcaggagcctgcgagccccttcatctccctttaatccctttacataaggaaaacatgtcgacgagaagtagattggcggggtgaacgcccctaaaaacgatgacacggcaaatgactcaggagccagagccacaagggcattgagatgatcgacggaaagctgaggctggtcggctaacaaaatgacaatgccgtccgcccccatgctttctgcttttctcaccccgctgctgactgaatgcccctgacccttttctgcgtcttggcaaacgtgcaggctccagcgtttttgaaaaggcggagcgtgatacggcgctcctatccactcaagggaggcatgttctgtccgctcgacgaccagcacgtgatcaaggcgggacgacagagcagttttcaaggaaagtgagcctatgttttctccttttagcggcaaagccagcttgttttgtcccattcttctgcttttgccggcagcgagaaacacgccgatcagataggggcttctcatacaaccgccacccgttttcttgtttgaatgatttctgcaactacacttaccgcaatttcctcgggaccttccgcaccgattttcagcccgaccggactgtaaaagtgagacggaggatgttttccgctcagcagccgtttcgtgcggtttgccgaacccaacagtccaatataatggaggttttgagaaaataagaagttgatgatcgtttgatcgtgctgataatgatgggttgccacaacagctgcatcatgcggaaaaaattgaaattcgctaagcatttgttccggaaaagcggtgatcagctgatccgcttttggaaaaagagaggatgtacaataagcgggccgccaatccgtcacgataacagaaaaccctgtgtcagccgccaaattggccagcggtacattatccggtcccgccccaaacagaatgagacgcggcttcggttcaattcgctgaataaacatgttagtggtttgatcgaaatgcggtaaatgaagcgttgaaacagtacgttgaatatcttgcagaggcgcgtccggccagttcccaaaatgtccgttctccgtcagaaataaataatgggaggattcaatctttataacggaagtgacagctttgcctgaatgaaggcagtccctcactttctcatagtgccgccttttttcctgagtgattcgctctgcatgaacatgaataatgccattgcacccggctcccatgccccaagaaagatcgtcctccgaccgcatgtcgtagggaatcagcgttgatgtgagctgatcgcccagcgcactgattctttggaatacatcttcttccacacacccgccgctcagcaagccaatccgtctgccttttttcttaaagagcatagaggcgcctgcttttcgatacgcggagccttcaacttgaacaattgtcgccagtacagcctcctcctggtcttccaggagcgcatctaacatcgtgtgaaaattccccaatgccgcatcctcctctcgaaaattgccgtgagaaacaactagttcagcgtgattttataggtaacttgtataaagaatagacgatggaagaaaaaatgactcatgatttgtcagaaaatgaaacacatagaaagaggatttgtaaaaagagtcaaacgaagaaaatcagattggagaaaacacgaaatcatatcgttaaaaagcttgcggagttccgcaagcttttctttacaccgctgcctggcggccagcgttttcatacacatccagcgctgcttggagcgcttttcctgcttcgattcctgcgttatgtctgagaagcacagcctctaacccggcaagcacgaatagcacgttttcttttctgcagctgtaccccatcgtgccgatcctccagatcttccctgcaagcgggccgaatgagctggcgatttcaatgccgaattgtgccagcagcatgtcacggacagactcgccgtcaatgccgccgggaatttcgacacaggtgacaacaggcattttgcagctgtcatctccaaacaatcttagccccattgcctttatccctgctgctaatgcggcttcatggtgccgatgccgctcgaaacgcgtctcaagaccttcttcaagcaccagtctgactccctcacgtaaggcgtacagcatcgtcgtcgcttctgtatgatgattgagccgtctttcgctccaataatcctcaagctggctcaaatcaaagtagttgcttgtaattggccgatttcccgaaagtgctgccctgtcagcttgtgtcgcaatcccgcgttccacctttttgcgagctgcaatcacgtccgccacccgctcattatatgtaatcggcgccattcctgaaggcacagacaaacatttttgcgttccgccgatggcagcgtcaatcttccattcatcgactttaacctcgcagcccccaatcgttgcgactgcatcgacgataaacaatgcatcctcggtgcggcaggcttcgccgatggctttcagcgggtgaatccgtcctgtcgatgtttctccatgcaccatggccacaattttcggcttcactttttttatctcccgtatgatgtcctccgggtcaaaaaccgttccccattcgcactccagcatatgaacatttgccccatatcgctcggcgatttcagtcagcaaataaccgaaacggccgtaaatgggaatgagcacatcatcttccggctctatcacactagccagcactgcttcaattcccgcccgtgaagtgccgtcaatcgggtatgcccagcggttttttgtttggaacagctcccgaagcatctccatcgtttcattcataatacctgtaaacgccggatcaaattggccgacaaccggggtgctcattactcttaatacacgcggatcaacctcaacaggccccggtgtcataatcgttcttaacggggtgcataattctcttctgcctgacacagccattcctcctttatcagtaagccagtttgtataataaatcagtcagtgcgcggacgccgatctcaagctgtctggctgacgtatattccttcggtgagtggctgacgccgcctcggctcggcacaaacagcatacaagcaggatagcgccttccgatcatttgcgcgtcatgccctgctccgctcaccatttcctcacagctgaagccgttttctaatgctgtttcaaaagccgcagccttcagcctttcgtccatcggcacaggctctatccgcatatattcatcaatcacagcgcgaattcctttttgtaggcaaatgccgttgatcaaagcaaccatgtcttgatgaaactgttccagcacatgctgatgctgatggcgaatatcgattgaaaactggacgcggcccggtatgacattggctacattgggctctgccgttatttttccgcatgtcagacggagctcatccggcagctcatccgaccgcagcagcagctcatgaatgatacggctgctggctgcgagcgggtccttgcgccatttcatggaggtggttcctgcgtgattgcattctccttcgagcgtgacgagatatcgtctctgccccgcaatacttgtcacgatgccgagatcccggcctgacatttccaacgtcttcccctgttcaatatgcagctcaacaaacgcgctgatatctgtcctatatgctgactgaaacacacctttgccaaaaccgctctcatgcatcgctgtttggagggagactcccgactcgtctcttggctcttttgcatcttgttctgaaaaaacacccgtcatattccccgacccccaataggtcattggaaaacggctgccttcctcctcacataaggagaccgcctcgagcgttttttttggcgctccgtatgtttccttgagctgctttaacgcgagcattgccgccagaacgccataggcgccgtcgtattttcctccattgatgacagtatcgatatgtgaaccggttacaatgacttcatccggagactgggtgcccgaaagccttccaaacacattgccgacatcgtcgaatcttgtttcaagcccgaaagaagacatttccgttttcacagcaagctgtgcgtccatccactcttttgtgtataaaagcctcgttacgccgccatccgcagacgcaccgtattgggcgagccattcaatataatctgtgatgctgttttttactgaaagcttctgcttttccatgtactcccccctctggccgctatggtgacttcattatagaaggagcaacatgatagttcattgacagattaaccaaaaaaacgtttattttttagccacagtatccatccagcaaccagatacaccctacatgtcacaactattttgatgtaaaggtcaaaagaaaacacggtaaggaagagagccagcaagagcgaaagagagggtcaaaatgcctttcatatgaacaagctaagctggagaggcgatgttcgcggaacggatgaaaacagaaatgccggcagcccgcaaaaacaggacctaaagatatggaaacaggagatttccgcctcctccaaagggactaatttacaattttaatgaaaaatatacaaaatgacacttctatcctttatttcaattttagataatagatatgatctgataaaaggagggcaagtgatgacaaaaaaagcatggtttctgccgctcgtctgtgtattactgatttccggatggcttgcgccagcagcttcagcaagcgcgcaaaccacattaagccttaatgaccgattggcgtcttccccttcaggaacgggaagccttctctcattagccgcccccgctgcaccctatgctgacacagatacctattatgaaggggctgaaggtaaaacaggagactcgctaaaaagcaccctgcaccgtattatcagcggacacacgatgctgtcctacagcgaagtgtggaacgcgctgaaagaaacggatgaagacccaagaaatccgaataacgtcatcctgctctatacgaatgaatcgcgttccaaaaacctgaacggcggcaatgtcggcgattggaaccgcgagcatgtctgggcgaaatcccatggcgattttggtacgagcaagggacctggtactgatattcatcatttgcgcccggctgatgttcaagttaacagcgccagaggaaatatggattttgacaatggcggcactgaatatgcgaaggcacccggaaattattatgacggcgattcatgggagccccgcgatgatgtgaaaggcgatgttgcccgcatgctgttttacatggctgtccgttacgagggtgatgacggctatcctgatcttgagcttaatgataagacaggcaacggctcagctccttatcatggcaaacaatctgtcctgctcgaatggaataagcaggatccggttgacgaccgcgagcggaaaagaaatgaaatcatttatgaaaaatatcagcacaaccgcaatccatttatcgaccaccctgaatgggcggatgagatttggccgtaagaaaaaggtgctccttttgaggagcacctttttctaatacacagcctcttccgtttccgcatcgaaaaagacgacgtggtccattttcactgagagctggattgaatcgcctgcatcgattcgcgtgtttccgtccaggcggaccttgagccgctcgtccccagccatgacatgcactatgagctccgagcccagattttcattcacttccacgttcgcttgaaacactgaatcaaacaactggtcatttcctgtcatttgtgtgatgtgctccggccgtacaccggcaatcatctgttctccggcatatcccttttccttcagccgctttgctttttcttcaggaatatgaagccggatcgaagaatttgtgaaaaacagctcgccatgctgctgttctatgatgcctttcaaaaagttcattccgggagagccaatgaagcctgcgacaaacaaattggccgggtaatgataaatgtcatgaggtttcgccacttgctgaatttccccttcattcatgacgacaatccgatctcccattgtcattgcttcggtctggtcatgcgtgacataaatgatcgttgcctctaatcgctggtgcagcttgctgatttctgtccgcatcgtcactcttagttttgcatccagattagaaagcggctcgtccattaaaaagaccttcggctccctcacaatcgacctgccaagcgccaccctttgccgctgcccgccggagagcgccttcggttttctcttcagcaaatgttcaatttctaaaattctggctgccgcatgaacccgctcggcaatttcctgtttcgccatctttctgagctttaatccaaacgccatattatcaaaaaccgtcatatgcggataaagcgcatagttctggaataccatcgcaatatcacgttctttcggcggaagatcattgacccgctccccatcaataagaagatttccttcagaaatgctttctaatccagccaccatccgcagcgttgttgattttccgcatcctgacggccccaccagcaccaaaagctccttatcctttacatctaaatcaaagtccttcacggttaattgtgagtgatatgattttttgacgtgttcaaatgttaatgaagccatcagaaaagtccccctatcttttgacccgttatttcgtcactggaaacaacttggtctttctgttatttttagagtaatcgattcccatttttgctatatttctaaaataaaaaatgtaaatttgtattataacgtcataatacattataatataaataataggttaaaaggaggctaccctttgttaaacaacggaagttctacacctttatacattcagctaaaacaaatcatcactgatgacatcaaaaagggcgtgtattccccaaccgccaagctgcctaccgaaaacgagctttgcaccaagtataacgtcagccgcatcaccgtcaggaaagccattctcgatttagtcgaagaaggctatctgatcaggcagcagggaaagggaacgttcgttaaaagccctaaattaaaacgagagctgatcgctgtaaacggctactcggaatttatggaatcaaccggcaaaaaaccgaagcatcatgtgctgtcccatgacatcattccagcgtcaaaacccatcgccgaaaagcttcaaatccaacccgagagccctgtggttgaattaaaacggattttatataatgatgatcagcctctcacctttgaagtgacgcattatccgcttgatttgtttcccggcattgatacctttattgctgacggcgtctccatgcatgatattttgaaacagcaatacaaagttgtacccacgcacaatacgaagctattaaacgttgtatatgcccaacaggaggaaagcaaatacctggattgtgatatcggggatgcgctgtttgaaattgataaaacggcttttacatcaaacgaccagccaatctattgctcattgtttttgatgcacacaaaccgtgtcacttttaccatcaacagcccctacacataacaggcataaaaaacgagacactgcttatagtattctcgttttttcactgcttcccccgtcctccaagcgataaggatagccatagccgaaagctccgtacacaccgcaagttttcgcagccgtttcagcagcctggcgcaaagcatacgttatatcctgcttcacgcaaaaggcagtcaaaaagcctgctataaaagaatctcccgctccaagtgtatctattatatcagcttccacaatcggctgatgatagactcgatcacccgcagacaggattgctccttggccccctcgggtcatacaaaccattttggctccgtacccatgagctgttttggcaagctcaccgcattccgactcactcaaatcgcttcctgaaaaaaacgcatacgtcacataaggacagaccctcctcaaataatcatcctcccgattggttgaaaaatcaaatgagaccgggaccagcccgcacagctgcggaagatcgttctcaagcctgctgtacacgctcgtatgcagcagatcatgcccgctgataaaagatacatctttctcctgaaacgcgaggcgaagccgggactgaatgccgcctttatttgatctgacaaaaatgcggtccccctgttcatcaagggtgacaatcgccatcccgttttctccgtgcgcctggcggatataatctgcattgacctgctccagcttgagaacgttcaacagatgcgccgcggcttcgtcattgccgacgattccgatataggaagactcatgcccgagccgcttggcaagcacagcaacgtttaaggcatttcctcccgggtaaaatgtttcttgatcctggtagtaatctacaacattatctccaaccgcaatcaatttcatagcgcttcctcctttatccttttacactgccgcttgcaatcccgcggacaaaatatttctgcatcaataaaaatagaataataatcggcgcggctgaaatcgttaaccccgccagcaggacgccccagtctgtctgcagcgcgtctctgaactgcatcagcccggctggaatggtccgtaaattctcatcatctatgaaaataatcgcaaacataaactcattccatgtatggtaagccgtcaaaatgccggatgtcaccaaaatcggcacgctcattggtaagaaaattctgaaaaatactccaaaacttgtacacccatccaaataggccgcctcctccaattcttttgaaatagaaagaaaataagagcggatcaaaatgatggtgaatgggatccgataagccgcatacggcaagattaacgcccaatacgtattgtacaggcccagcgactgaataatagaataaagcggcacaagactgacctgcggcgtcagcatcaatccgccaagacatagcaccaaaaagaatccttttcctttaaactcaaaccgggaaaggccatacgctgcccatgcactgataaagacagtgatcacacacgtcagcgccgtaacgatgacactgttcataaaataagaagaaatcccctgattccaggcggaaacaaaattttccggatgccacgaagacggcagcgaccagctgtgctcaaaaatatcgtcagagtttttaaaggcgctcatcaccatccagagaagcggataggcaatcgcaatcagataaagaaacagaaaaacccacacagacgtttctccgatataccattttcgtctaggcttatctttcacctcaatgtgctggtcaggcaccggctccaatctgaacgaatctgtcttcttctgaggcagcatcagttactcctcctttccggttttaaagaacttcatttgcatgagcgataatgcaagcgtaatgattaacacgacagtggcaatcgctgaggcgtagcccatcatatcctttgtaaaggcgcttttatataaaaacgtgctcaagacttctgacgcttttcccggcccgccgcctgtcaaaatgtacggctcattaaagaccgtaaaggctccggtcagcgtcatgaccaccgcaacaaaagacatctctttcgtctggggaacagtaatatgaaaaaactgctgaattttacccgcgccgtcaagccgggccgcttcatacagttcatccggtattttttgaatcgacacgatgtacagcatcgcaatataaccgacagattgccactgggacacaaaaatgacagaaagcatagctgtgctgtcatccccgagccaggccctcgtcagctgatcaagaccgatggcctgaagcagctgattcaaaagccctgtctccggattgtaaataaaatcaaacaaaagcgcgatcaccgtcattgagatgacaaccggcaaaaagaaaacggtacgaaaaaacggcgaccattttctgaccagcttatcctcaagcaccgccgccaaaatcaaaccgccaaatacctggcatacaattgagatcactgcataaagcacattattggtaagtgcctgatagaagacaggatcatgaaataattcaacatagttttttaagccgataaacgttttttccggagaaaatgagctccactgaaacaggctgaggaatacattctcaaaaatcgggatataaacgaaaagtaaaaaaacgagagcgggcaccaaaaacaaataggggattattttattctgattgaccaagggtatctcatctcctttataaaaagaaaaggtgcgaagcttcaccttttctttgatttattcagctgacgccctcacctgctttgctgccttttgaacggctttcatcacctgctgcggtgtcatgtcgccgccaagcatttgctggacgcccgttaggtacgcatctgcgacttcaacatcgacatccatatcaaaccatggaaccattgatttggcatcaacaatatgctgaacggcttcacgctgaatggctgttgcattttcttcagtagccgtaccttgcactgcactgtatttcccgacatctttcacgagcttttcgcccattcttttcgacgtcaagaactgcaaaaattccatcgcttccttcggatgttttgttcttgaggagatcatgaatccttccggcgctcccgttaacgcttctgaagatcctttctgcccgctgatttcaggaaatgggaacatcccgagattaaccggttcaaccagcttgatttccgctgtttccgcatatatcatcgccgactttccgctcttaaattgctgtctcacatattcgtggtcgacggagtttacatgtttattaaagtaaggcatcagctcttgaagcttttcaagtgcttttacgtagccttcatcagtaaattcacccgttttggcgttatagtccttttcccgtgttttttcatcgaccatccgctgattaagcgtgccgatatagtgcgagattgtccaagtcgcctttgttccaaagctgatcggtgtgtagccatgttctttcagcttttttgacacatcgattaattcatcccacgtcttcgggggatcaagattcagcttttggaaaatgtctttattatagaagaatgatttagcgtccatttgccacggtacgccatattgcttgttttcataagtaaatggtgtaatttgcgattgaacgagctgtgatgaccaatcggtgtcatttttgtagtaggacgagagatcaagtgctttattgcctctgataaatttaaaagcaaactcatcgctccaagagaagtaaatgtcaggagggctggtggttcccagcatgaccttaattttatctttataggagtcatttaaaacggcttcaatttgaatgtcgatatctgggtgatctttttcaaattccttaacaacctcttcaaaataacttttttccggctcctttggccatctgtggaaaaatttcaatgtcacctttccgtccgctgaactgctttggctcgaacagcctgcgatggtgagcatactgacagctgcaatgatcaagaacaacaacattttcttcaaagggttggcctcctctggacattagactataatgttatataacattatagtctaatgcataatggttcttcattttcagatcaatactcaactttccacatgtatcttctatgagataaaggatgatttctctcctctgccagctcgtctgcatagcttctcagcacacgattgagaacgagcggagcaagatagcctttaactgaatcgtcaattgcagtgaagtcgtaagatgcagcatcaagcacagtgagctttttgccatactttttcgagaaggtaagcgcccgctcttcaagaggtcttgtttcatctaaaccgagcaggatgataaacggcacggattcatcaataatttcaaacggtccgtgaaaatattctccggcatgaatggcgtgggaatgaatccattgcatttccatgagaatgcagatgctgtaggagtaagcgacaccgtagtttgcaccgcttgccatggtataaataatgctttctttttcatgggcttttgcaaattgcttggcgttgtcagcttcctgcttaagggctttttcatatacagcctgcaattgatctaagccttcaattgcttgctcaaatttcgtattgttttctaatacttgcagggttccaaaaacgatttgatacaaaacgccatagtttgtattgatcgcaagcgcctcatcaccccaatcgtactgggcaacatattgcgcttcctgcgctaaaggagactccggtttaaacgtcatcgcaatcgtaagtgcgcccttgccccttgcaaacgcagcagctttgactgtctccggggtatttcccgaatgcgagcacaaaataacaagagacttttcaccaagctgaacagggttgcgctgaataaattcgttggcgctgtagagatcggagtttattgattttgactctctgtcaaacacatacttactcggatacataatggcagaagaccctccgcatgcgacaaagaatacatgatcaatggttttccctttcaaatcctgcaagaaagcttgaacctcacgatttacttttgctgtggcctgactcaaatccttcactcctcgtttttattatataacgttatataacattatatattgttatattaaagtccgcgggtaggattgtcaatattattttctgaaatttctcaataatttattcggatgacagacaaagggtctatatgcgaaaaaatgcccaaatcaaaagccagaacttgacttaagctctggcttcgctgttcaatccgcagactgacgtcttatttaaaaaataccttgtctatattgtacttcgagtgctgtgtattgatgatatatgtttcgtaaatctctctttccattggatcatcaactacacatacctcaattttataaacttcatctctgtgatgtttgatcggtgaaacagtgtcttcgaaatgcttcttaattctctgtcttaactttctggctttaccgacaaacagcagctcgtcatgaatgttgtaaaacataaaaatgccgcctttgtcccttgggatctggtgaaagtcgatgaatccgtgaatcggttttatcttcggctcgttatcattagctgactgctgtcgttcagtgatggtgacattcggtgcgggtatatcaatttttatcaaaatcagttcacgtcctctttttcattaaagataaatgctaacacatacagaaaagaaaagctagaacagctttattatatttgtttgtcatgctcttacttattatgcaagtgctccggctggatcataaggactaaggtctaattctgtctgctttccgagaactagctttgcgagctctgcacccaaaaacggccccatcgtcagtccagaagcacccaaaccgtttgcagcgtacaggccttgaacattcggcacggcccctacgaccggcagaaatcccggtgtaaacggcctgaagcccactcttgtttcaacagcagccgcatcagcaagacccggtgcaacggctaacgctttgctcaatacttcgtgctggcctccggctgtcacacgaagatcatcaagaccggcatcgttttcgtgtgtggcgccggctacaattctgccgttatcaaacgacagaatgtactgatcactcggcggcattacaaccggccacgatcctgtatctgcatctgtcatttcaaaatgcataatctgcgctttttgaaatgacacttgaaaatgaatgccaagaggcttcaatatctcattggcccatgctcccgccgtcacaatgaccgcgtcagccgcaaactgctttgtatctgtttgcacgccggtgactgttccgttttcaaaaagcaaggacgcatttcctttgatgaccgttgcgccgcgtttctctgcagcgcttaaaagcgaccggcacagcgctcttccgttcacacgggcggcaccgctgatatgaaccgattcatagccgtcagctaaaatcggaaacagctttttcgtttcacttgcagacaagcgggtaatgtcgccgatttccggcgcatcctcccgtctcttatacgccctttcctccattttatcgagtttagacgcgtcagtatgaatgctgatggcaccgacacgtttgtatcctgtatccgattcaccgtctttttccaattgatggattaaatccttatagtaccgcgctccccccttagcaagctggtaccaatcctgattacggcgctgcgagagccaaggacagacgatccccgccgccgcatcagtcgcttgtcccggctctttccgatcaatgacagtaacgcgagcgcctgtttttgcgagatgataagccgtcgacgcgcccagaatccctgcgccgacgatgatgtacgatttcatatgcaaacaccttttctattataatgtctattcattttaccaaatcaaatgctttccttcgaccttttgccctaatgtggaaaaaccgcgaagttcgtccaatctctttactctcctatcgaatatcctgtcactatcaatagagaaaggatgataccatgagcgaaaatcgtcatgaaaatgaagaaaacagacgcgatgcggcagtggcaaaagtccaaaacagcggtaatgcaaaagtcgtggtcagcgtgaacacagatcaggatcaggcacaggcgcagtcacaagacggagaagactaatgaacgaaaacatcattcctcttaacagacatactcaagagatacccactactgaatctgttatcaaaaacagcggcaactcagaggtccatatcgacattcacattgatacaatgccaattgcttttgctatattatgctctgcattagccgcaaagcagatgacaaaagaggaattcgatatggcttatactcaattgcgagagatgaacagagaaaataacagcagatcatctgtaaagcaaattatcaatcaagagacagaagaagagtaaaaaaccgcggcccctcggccagcggtttttcttctgcatacaaaaaggacgcgactgaatcggttacttctgtacaatttgaataaggttaccgcatgtatcgtcgaagacagctattgtgacttcgcccatttttgtcggttccgtcgtaaacgtcacgcctttttcctttaatcggttgtactctttttgaatatctgcaacgccaaacattgtggccgggaggccttcggagaatatcttcttttgatactccttggcggcaggatgttcattcggttcgagtaaaagctcggttccgtcttgatcatctggagaaacaagcgttatccacctgaatttccccatgggaacgtcttccttttttataaacccaagtttttctgtataaaactccagtgccatgtcttgatcttgtacaaatatactggtaacaacgattttcatactgtttttccctccttcgatatgaatgaagcatggtactatgctaacaatctggctacaagcaaaacaacccacacatttatcagaggccctgttctgattttataaaattattctatccatcctttcagcaaatttttaagcggttcgttgttgaatataagtactcgatattttccctttcgttttgatgttacgagtcctgcatcctccagtacagaaaggtgtttagctatcgcctgtcgcgtaatagaaaggtcgtactttgtaataagacgtatcgtaagttcatacaacgtcagctcgttgcgttcagataattcgtctaatataagccgccgagtcgaatcgccgagtgctttgaatatagcgtctttgttcccattcatatattgagtataagcaacccattagttgcatgtcaagtataagcaactgtatggttgcgtgatatagaaactgaacctatccggcgcaggtctgaaatattctaatcgataaggaattaaaaccattaaaataacagtggatatgtctctgaaaaataaaagaagacgaacttcaaaagttcgtcttctacaatcaaattcggcacgccggccattttaaagttgataactatctctaaaccccttgataaacaaaggagttttcatcattaaccgatagaaccttccatttcgaacttaatcaaacggttcatttcaactgcgtattccatcggaagctcttttgtgaatggctcgataaagcccattacgatcatttcagttgcttcttcttcagaaataccgcggctcatcaagtagaagagctgctcttcagatactttagacactttcgcttcgtgctccaatgaaatgttatcatttaagatttcattgtaaggaattgtgtcagaagttgatttgttatccataatgagcgtatcacactcgatgttagagcgggcgccttccgctttgcgtccgaagtggacgattccgcggtacgttacttttccgccctgttttgaaatcgattttgatacgattgtagatgatgtgtttggtgcaaggtgaatcattttcgcacctgcatcctgatgctggcctttacccgcaagagcgatagaaagcgtcataccgcgcgcgccttcgccttttaggatacaagccggatatttcattgtcagcttagaaccgatgttgccgtcgatccattccattgttgcgttttcttcacagactgtacgctttgttacaaggttgtaaacgttgttcgcccagttttggatcgttgtataacggcagtagccgccttttttcacgatgatctcaacgaccgcactgtgaagtgagtttgttgtgtaaacaggcgcagtacagccttcaacataatgaacgcttgcttcttcgtcaacaatgatcagtgtacgttcgaactgacccatgttctcagagttgatacggaagtaagcttgtagcggtgtttcaaccttcacgcctttaggcacgtagatgaaagaaccgccggaccaaacagctgagttaagcgccgcaaacttgttatcagtcggcgggattacttttgcccagtgctcacggaaaatatcttcattctctttcagcgcgctgtcagtgtctttaaagacgatgccttgtgcttcaagatcttctttcatgttgtggtatacaacctcagattcgtactgagcagaaacacccgcaaggtatttttgttcagcttcaggaataccgagcttgtcgaatgtttgtttaatttcttcaggaacttcatcccaagaacgctctgaacgctcagacggttttacgtagtacgtaatttcgtcaaagttcagtgagtttaaatctccgccccattgaggcatcggcatattgtagaaatgctcaagtgatttcaagcggaagtcaagcatccattgaggctcttctttcatgcgagaaatttcttctacgatttcttttgtcaatccgcgctctgaacggaaaatggaaacgtccttgtcgtgaaaaccatacttgtattcaccaatatcaggcatttttttagccatccattttcactccaatccttttaattgccgccttcttctttcgcgactcctttttcaagtgctttccatgacagggttgcacatttgatacgggcagggaattttgaaacgccttgaagggcttcaatatccccgagatctatagaatcatcatactctttcccttgcatcatatccgagaaaatcttagacatggaaagggcagtttcaatatctttccctttaatcgcctgagtcatcatcgaagcggatgccattgaaatggaacagccttccccttcaaacttcgcatcttccacgatgtctccgtcaagcttcattgtcagtctgatgcggtcgccgcatgtcggattgttcatatccacgacaatgctgtcatttaaaacccctttatttcgcgggtttttgtaatgatccataatcacctgtctgtacaatgtatctaagtttgcattaaaagacatttgtaaaatactcctttgtcttttgaagagcttccacaagcttatcaatctcttcctctgtattatacagataaaagcttgctcttgcagtagcagttacatccagccatttcatcagcggctgcgcacaatggtggccggctctgactgcgattccctccgcatcaagcacagtcgccacatcgtgcggatgaacatcatcaaggttaaatgtgacaagcccggcacgctcttccggcccgtaaaccgttacgccgtcaagctggcggaagcgttcaagcgcataagctgcaagcttgtgctcatggcgggaaatctcatcaagaccgatttcttcgagaaaatcaatggcggcaccgaggccgattgctcctgcaataatcggcgtacccgcttcgaatttccacggaagctctttccaagttgattcataaagcccgacaaagtcgatcatttcaccgccgaattcggcaggctccatgttttccagcagggctttctttccgtacagcacaccaacaccggtaggtccgcacattttatgggaagaaagcgcaaagaagtcgcaatcgagatcctgcacgtcaattttcatgtgaggcgtgctttgtgcaccgtccaccacaatgacagccccattgtcatgagcgattttcgccatttctttaatcgggttgaccgtgccgagaacattagatacatgagacaccgcaacaatttttgtgttgcttgtgaccgtttctctgacgtcttctaaagaaatcgttccgtcttcctgcaacggaatatattttaatgtggcgccagttgcttttacagcctgctgccacggaatgatattcgcatgatgctccatgtaggtgatgaccacttcatcaccaggtttcaggttggcgcgcgcatagcttaacgccaccatattcagtgatgtggtcgtgccttttgtgaaaataatctcagccattgacttcgcgttaataaacttgcggactttttcacgcgctccttcataaccatctgtcgctctggttccaagtgtatggacgccccggtgaacattggaattgtattggttataatacttatccagtgtttcaatgacagcacgcggcttctgggaagtcgccgcgctgtcgagataaacgagatcatgtccgttcacttgctgatgaaggatcgggaactgttcacgaatatctgtgatattcattacttcactttcctttcgataacagaaactaattgtttcttaacgccttcaatcggaagttcatttactaccggtgcaaggaatccgtaaatgactaagcgttctgcttcttctttcggaattccgcggctcatcaggtagtaaagctgaatagggtccacacggccgacagatgccgcatgtcctgcagttacatcgtcttcgtcaattaaaagaatagggtttgcgtctccgcgtgctttttcgctaagcatcagcacgcgtgattcttgctccgcattcgctttagaagcgccatgttcgattttgccgattccgttaaagatagaagaagcggaatccttcatcacaccgtgcttcaagatatagccttcagaagctttaccgaaatggatgatttgtgttgtgaagttttctgtttgctctcctcttccgacaacaaccgttttcgtatcgccgtatgtgccgtcaccgtaaaggtttgttgtgttttcggaaatcgtgtcgccatcgttcatcaggccgagagcccactcgattttgctgtcgcgtccgcgcgcagcaccgcggcggttcacataagttgtcacaccgcttgacagattatccaccgcaccgtatgtcacgctggcattatcacctgtgatgacctcactgataatattgaagacagcgtctttcgggtttacagtgctgatgtagttttctacatatgttacagagctgtggtcttcagccacaatcagcacgtggttgaatagagctgtatcattgctttcgtggacataaacagcctgaaccggcgtctccacctgaacatttttcggaacataaaggaatgctcctccgttaacaagagccgcgtgaagtgcagttaacttatgttcgtcaaccttcacgccgtccttcataaagtatttctccaccaagtcgctgtgctcgcgtgcagcagtcagaatatcagtgaagatgacgcctttgtctttcaattcttgagaaagagaaagatgtgccggcgtctggtcacgctgtacgtataatgttttatcttcgttttcaatgtcgatcagcgcttttacttcatcagtcaaatcttctaatgaagaaagcggttcgttatccactgtatgcttcgcgaaattcgtgaagttccagtttgtgatttttgttttgtcaggtttcggcatcggcagatcctcagcttgttcaagagcctgtaagcgcaggttcttcagccaggcaggttcttggtgcttttcggaaaagcttttgagatactcctgatctacggatagttttgtacctagtgtcatattaatccccctaacgcttacgcttcttggccaacagtttcgtcttcaatgccaagttcttgtttgatccagtcataaccttctgcttcaagacgctgtgcaagctctgcaccgccggattttacaacgcggccttgcatcataacgtgaacaacatccggagtgatgtagtttaacaggcgctgatagtgagtgatcatcaggcagccgaagttttcgctgcgcattttgttgatcccttttgatacaactttcaaagcgtcaatatcaaggcctgagtcaatttcatcaaggatggcgattttcggttcaatcatcattaattgaaggatttcgttgcgttttttctccccgcctgagaagccttcgttaagatagcgctgagccatttcagggtccatttcaaggaactccatgttttcgtccattttgcggatgaatttcatgagagaaatttcatcgccttcttctctgcgcgcgttgattgctgagcgaaggaagtcggcatttgtcacaccgctgatttcacttgggtactgcattgcaaggaataagcctgcctgcgcacgctcgtccacttccatctccagtacatctttgccgtcaagcgtgatgctgccttttgttacttcatatttaggatgccccataatagcagctgataaagtggatttaccagttccgttcgggcccattactgcgtggaattctccaccttttatttcaaggtttacaccctttaagatctctttcccttcgatttcaacgtgaagatctttgatcgttaatgttgaagcagccatatctatacctccaaaaatatataatcattattctcattttattctcattctaattttataacaaatgaaaagtaaatacaactttttatcgtgccttgcacattcctcaagtttaacaaagatcagcactttattaaagcgattgaaaaagaaaaagagtggattcccacccttttttaaaagattgattttctcaataagctcccgcagaaatccgcttgcttttttcataatcaagctctctctgccgctctactttcattcttgtttccagccggcgtccatattcctcgtatccaattccgtgtgacagctgcatcgctttttccatttctgacgtataatcgaggttcagtctgtcctggctgctgcaaataatgaatcaatcccttcatatatttgctttttattgtaccagtgctgcgttggatgccgcaaaaacgatttggcgtgaaatagcggcagatgagacgaaagcatcctttcagaacaaatgagaatggtttttcggaatattccttctcttaatgcgtggtgtttccgaattcctcaatgcactgttgaacgactgtcacgccttggctgaaagctgcgccgcctccaaatgccgctgccacactgacggcttcgagaatgttttcttctgacgctccctgatcaagacagccttttgtatgatagatcatgcaatattcgtcctgagcattgatggcaattccgagggcgatcagctgtttttctctttcagtcagagaattcccggcaaagcactgttcagtaaattcgttaaattttcttcccatcagcggcatcttttgttcaaatgtgcctaaaccatgtttatattgttttaacgcgtcctgcatgcttcctctgtcttgattcaaagaaaatccctccatctgtttaacattcctttttattatgaacagcttttaggaaaatacgcgaaaaaaaccccggaattctcatccggggtttcagtcttattcagatacaggaagcacagctccgtcgtattttttctcgatgaagtctttgatctttttagagtgaagaacttccatcagcgctttgatttttgcagaatcttcttcgccttttcttactgcgatgatgttagcgtatgggttgtttttcgttgattctacttcaattgcgtcttttttaggatttaatttattttggatcgcatagtttacattgatgaagaccgcgtctccttctttgttttcatatgcttttgccgttaattcaggcgctacttttttgaattcaaggtttttcgggtttttcttaatgtctttcaatgttgcgtcaactgtttccactttagaatcaagagtgattaatccagcgttttcaagcattgcaagcatacggccttgttcagcaacgttgtttgtcagaatgattgtcgcaccgtctggaaggtctttcagtgatttgtatgttttagagtaaataccgaatggctctaagtgaacagcgccggcattcacaagtttgtaatctgtgttttctttcatttcttgctcaaggtaaggaatgtgctggaagtagttcgcgtccacttctttatcagctaaagctttattgtacattttgtaatcactaagcactttcactttcagcgtatagcctttttctttcagcaatggttcagcttcttttaaaatttccgcatgcggtgtttttgttgccgcaacgacaatttctttcttgccggattcagcgccgttattcgaaccgcaggcagccataactcctgcaaatacaagcagtaatgcacccaaaaatagctttttcaatgtaaatcctcccttatcgtttgtctataatatttgttattagatcaccgatgatttgaataataaacacgatgattaaaataaacacagtagcaacgaaggtaacatcagcgttattagactgatatccttctacgtacgcaaggtttccaaggcctcctgaaccaatggctccggcaattgccgttgaaccgattaaagcgatggctgtaaccgtaatgccagaaataagagcaggcattgattccggaatcagcactttgaaaataatcgtagacgttttcgcgcccattgatttagctgcttcaatcacacctttatccacctcacgcagcgcgatttcaacaaggcgcgcgtaaaatggtgccgagccgattaccagcgccggcaatgcggcgtttggccctaagatcgtgccgactaaaaatttcgtaaaacctaatagtaaaataattaaaataaggaacggaatcgatctgaatatgttaacaacggctgcaatcactgagttgaccgctttattctgccagaggcttcctttgctcgtcagaaagagcagcaagccgaggatgaccccgatgacaaaagcaaacagtaaagaaatcagcgtcatataaagtgtttcatatgtcgcgttccataattcagttaaatcaacgttcgggaagtatttttcaaacattcgtgatcacctctgctttcacctgtttgtcattaatgaatcggatcacgttttgcacttcttcctcgtccccgtcaatgtggatgaacagtgaaccgtaagccccatccttcgtctgcgaaattttcccttgcagaatattgacgctgacattgaagtttctgatcatctctgtaatcagaggctgttcagctgactcaccgacaaatgtgagctgaaccatttttcctgatgctgtatcatcaagaaggtgctgaagcgtctctttcgtttcttccggctctgtcacctgttgaacaaatcgttttgtcatttgttcctttggatttttgaagacatcgagaacctcgccttcttcgaccaccttgccgttttccatgacggcgactctgttgcagattttgcgtatgacatgcatttcgtgcgtaatcagcacaatcgtcaaaccgagtctttcattaatatcggacaatagatccagaattgaatctgtcgtttgcggatctaatgctgatgtcgcttcgtcacaaagaagaaccttcggattgtttgcaagcgctctggcaattccgacacgctgcttctgaccgccgctcagctgggacggataagatttttcttttccttctaaacctaccagtttaatcagttcattggcgcgcttgatccgctcgctctttttcaccccggcaatttctaaaggaaacatgatattatctctgacagtccgcgaccaaagcaaattgaaatgctggaaaatcatactgatctcatggcgtgcttttcttaaaccgcgtccatttacttcattaatcttggttcccgccacttccacggttcctgaggttggtttctcaaggccgttcagcagacggattaaggaactcttaccagctccgctatatcctataattccaaaaatctcaccttttttaatggaaagcgagacgttttggacagcattgacatctccatgtttcgacttgtaaacttttgaaacatcctgaagattgatcaaagcaatcacctgccttaacactattctaagaaatcttccggttttttctgcaaaagaaaagcctttctgcacacttgagcagaaaggcttatataaaatgcctttctctcatctttcaaagctgaacgcttcgtgtgaattggcaccatttcaacagtgttgatggttgccgggcttcatagggcacttccctccacctctcttgataagagaaatatatagtctttttcgtccggaaattcttaatgtagaatagcacggcgaatgattaaatgtcaataaaataaatgatgtcaacttttactattataataatttattattttttaattttttaaaatcctctgaaaaaatccatttgtcagccagagaatggcttccagctttaacagggccctgaatgacccctttactttgaggcttccgctctgaataaggtgctgaagggaaatgtctccgtgcaataaatcaataatttccgtttggtttccgtaaaaggtcaggttggacgtttggggcggagaaacttttttcatttctccctgttcgtttattgagacggttaaggcttctgcttctccttggaaggtaatgagcaatgttgaggcattcaaaaggggttttaaaaacagatgctgatactcatcttctaaaacttccgctttctccatatgtacaacctcctatttgttggtcatacatacacatttctctctttgtcgcaagaacccctttataaaacgaacgacaatttcattggatatgctgagaaatatgtcataaatgggatgcggaagatgatttttgtttgatcagctcatataaataagaaacggaatgaaatgcatatcctctttcgaccatctttccgcctttaaacagcagaaaacaagggacgctttcaatttgatacgcttttgcgaatgtcggagagtaattgacattgttttgatagaaggcgacatccggcagcatttctttcaccactgtcagcattttgcttgcaagctggcaggtgccgcaaaacggagtatataaatatagaaggtacacatcatcttcaatgtgatcaagttcgtgttcttggagttctttcatgctatacacctcgggactttctttcaagaaaaatagtatggacattcagattcgcacgcagcaatacagaagcgatatggtgcctgggcgcagccgctacttccttataggctctgtcgacatggagatggcaggcttcattaaattcacgcttcagctgttttctcaatttctcacctgattcatcagcatcaactaatatatagacgtctttatcataaagctcgtcagccaattcctcgagcctcagctggctgattgttccgtttgtgcagataatgcgcatcggttcattcaggacgctttcgattttctctttatctgatttcccctcgacaatcataaccttttccagctcatccatcttcatcttgttcacctgccgcgtcaaatttgaaatgttcagattgtaaaagaaggcagtgaaattcaccgccaacattaacaccagccgttttcgtagtcacaatctacatattttgcgtcgtctccagagaccacatcggctgtcttataaaatttctcattttcaaaggaataaccggacttaagctcatattcattcatgcttgtcatttggccgatcatctcattatcatgatataacgagagccggccattttgaaagcggcctgtcacgtcattggtgacatcgagcttttgtttgtcgaaagccatattggacacctcccataacgttagcgtgtccaattgcttttacggctatcctgttttagtcttcttgtgtcatctcttcgtattgctctgctgtcatcagtttttcaatttcagaagcgtcagatggctcaacgacgatcatccatgctttttcgtacggagattcgttgacgaattccggactgtcatcaagatcttcgtttacttccacaaccgttccgttaatcggtgcataaagctcagataccgttttaacggattcaacactgccgaatggctcgtccgctttgatttcagcgcccacttcaggaagttcgacaaacacgatgtcgcctagttcggactgggcaaaatgcgtaattccgattctggctttttctccttcaacttttacccactcgtgttctcctgagtaacgcaaatcttttggtatgctcaattgaatccctccattttttacagcactacaataagaagataccacacttttcaaaaaaaatttacattaagcccagttttcttcaaattggtcttctttaaatccgacagtcactttttcgccgtctgttgtaagcgggcgtttaattagcataccatctgaagccagcagttcgagctgttcgtcctctgacatatgatacagcttttccttgagattgagctcgcggtatttcatgccgctcgtgttgaaaaatttcttgagatccagcccgcttttttcataaagcgcttttaattcttctttgcttggcggctgctcagcaatatgtatttcgtttatttctttcccatgctcttcaagccacttctttgctttgcggcacgttccgcatttagggtaccagtaaaaagttaacgacatcttcttccccctcaataaaataatcgaggttattttaacacagtttgttttaaaaacctaaaacagtgcttcttaaaaaagagctccgcgcatgcggagctcatggccaatcagacagtatatttctcagcctcaaaaatgcctgccgccgcctcgcgttttttctgaatcacgtttttaggcgttacgcgtgtcagcttgcgcagagcggaaagcatcatgcggagtgaatctccttcttccattgcgataagggattcctttgcatgcgcttcgatttcgttaaaggcctcttgaacgaaaatttctgtgtacagcaccttttgcgctgctttttcagcgccttgtgcggcaatggccttttccgttctgagcacggctgattccattgcgtatacattgctgacgatatccgctacgttcacgagaatttcttgctcacgatcgatcgcttttccgtatttttgcgcggctaggccggcagcaaacaacgcaatttttttggcttgcttgacgatatatttctcctgctctaagacgccgcttccaggctcttcaggcataagcatcatgagttcttcctgcagcgactgcgctttttcgaataaaggcagctcgcctttaagcgcttttttcaggaaggtgcttggcacgattaaccggttgatttcgtttgtgccttcaaaaatccgattgatccttgaatccctataggccctttctacttcgtattcctgcataaagccgtagcctccatgaatctgcacgccttcatcaacgatataatcaagcgtttcagagccgaataccttattcagagagcattcgatggcgtattccgcaatcgatttggcgatttgccggccgtccttgagatcttcggccgtgaactggctcatattgtcttcaaacagcccgacggttctgtatacagagctttccatcgcatacagccttgaggccattgtcccgattttttcctgtgtcaatgaaaaaccagcaatcggcgttttaaattggcggcgctgatttgcgtatgccgcagacagctcgatgacgcgtttagatgcgccgattgtgccaaccgccagtttgtaacggccgatgtttaaaatattaaaggcgatgacatgccctttgccgatttctccgagcaggttttcctttggcacttcagcttgatccagaatgagggttcttgtcgatgatcccttgattcccattttcttttcttccggtcccgtggagacacccgggaactctttttctacaataaaggctgaaaacttgtcgccgtctaccttagcgtaaactacaaatacatcggcaaaagcagagttggtaatccactgtttttcccctgttaatacataatgggttcctgcttcattcagcacagctgttgtttttgctccaagtgcatcagacccagagccaggctcagtcagagcataagcggcgatcttttcgcctgaagcgagtccaggcaaatattttttcttttgttcttctgacccgaaaaagacgatcggcaaggaaccgataccgacatgcgcgccataagaaagagaaaagcttcccgcacgcgaaaatttctcagtgatgagtgccgagctgattttatcaaggccgagcccgccgtattcttccggcacatcggcgccaagcagccctagttcgcccgctttcttcaacagtctgacagaatgctcgaattgatggttttcgatatcatctatatgagggagaacatcttgctcgatgtaatcctctgttgttttcgcaatcattttatgctcgtcagtgaaatcctccggtgtatacatttgatcgtatgtgacatcctcgattaaaaatccgccgcctttttgtacgtcagccgctttttttgccatttgtttttccccctttagcataattcaaatacaccggccgctcccattccgccgccgatacacatggtcacgactccaaattgctcgtttctccgtttcatttcatggatgagtgagagtgtaagctttgtgcccgtacagccaagcgggtgtccaagcgcgattgcgcccccgttgacattcactttttcttcatcaattcccaattccctgattacttgaatggcctgtgaggcaaaagcttcattcagttcaaacaagccgatgtcctgcagctgaagtccggcaagcttcaaagcgcgcggaatcgcttccaccggtccgattcccatcacttccggcggcacgccgcctaccgcaaaggagcggaatttcacaagcggcgccaggccaagagcatcggctttttcccggtccatcagcatgacagccgccgctccgtcactcgtttgtgaggaattgcccgcagtcaccgtcccgtcaacggaaaaggccgggcgcaatgtcgataagatgtctgcagtcgtttgcgggcgaacaccttcatcctgagaaaacacaaactgtttttccataggcttatggtcttctccgatttctgtcaccgtcacttcgacgggtacaatttcatctttaaattttccttctgcaagggctttagcggcgttttgatggctgcgaacggcaaacgcgtcttgatcctcacgggagacgccgtattttttcgcgacttgctcggctgtgtgccccatgctcatataatattccggtgccttttctgccaaagcaaggttcggacgggtaacatgccccatcatcggaacttgcgacatggattctgctccgccggcgatcgctgtatcgtaggcgcccagcataattttttctgctgcatacgcaatagactgaaggcctgaagagcaatagcggttaactgtaatcgccggaaccgtgtacggcaggcccgcgagcgcaccgatatttctcgccatattaagcccctgctccgcttcaggtgttgcacagccgataatcaagtcatcaatattgccttcgtagccgcctgcccgtttcagcgtttcttttacacaaatcgctcccaaatcatccgggcgaacggtggccaacgatcctttttttgcttttccaaccggtgttcttgcacctgacacaatgactgcctctttcataagctccctcctaattccgtaaaggtttacctttcacaagcatatgctgcattctcgcttgagattttgcctctcctgacaaactcaaaaacgcttctctttcgatctccaataaatactcttcatcaacctctgtaccaaacggcacttttccgcccgcaatgacataagcgagttttttcgcgatcttaaaatcatgctcagatatatagccggacagcttcatctgctcagcgccaagcaagagtgccgcataaccggtttctcccggcaccttgaccttttcttttacaggcggccgccagccggtatcgtataaagatgcggccagctgcttcgcatcgtataacaggtggtcttgattcacgctgatctgatccgtttcttttaagatgttcatctcacgagcctcttgagcggaagcggacactttcgccatcgcgattgtttcaaatgttttcattgccgcattcatcggatcatggccgcggcgaagatggttgatgtacagctctttgttacctcctccgccagggatgaggccgacaccggattccacaagtcccatataggcttcgcttgccgcttgaatgcgcgccgccggcaggcatgcttccgttcctccgccgagcgtcatgccaaatggcgcggcgacgaccggtttcgcactgtatttgatcttcatcatcgtctcctgaaaacggcggatcacaaaatcaacttccaaaaagttgtcatcttggacttccattaagatcatggcgagattcgcgccgacgcagaaatttttcccttgattgccgatgacaagccccttgtaattccgttctgtttcctctaatcctttgtggatcatttgaatgatatcgaggccgatcgcattgcttttcgaatgaaattcaagaagggccacatcatctccaaggtcaattaagcttgctccgctgtttttcgcaatcacgccttttgtttctttaagtgcttgtaaatgaattcgttttttgttttctttcacggctctgtattcgccgcggtcataataaaataccgttccgttctctttgatgtagaaggtttcatttcctttgtccagcatctcttttatccagccaggcatatctgctccaagctgctcaagcttttccgctgactgcttgaggccgatggcgtcccacatctcaaaaggtcccagttcccagccgaatccccacttcatggcttggtcaatcgcatgaatatcatcggcaatctcgccaagcagctcggctgagtaaagcagggtttgagaagtgatattccacagcaaacggccggccctgtcatccgaataaataagcgctttcattttggcttttgtcccttttgcctgttttgccgcttcaagtgccggtgatttcatttttgtccgctcgccgtaagtaagcgtcactgggtcaagctcataaatcgtttttccttcttttttataaaagccttggccggccttgcttccgatccaccctttttccagcatatcgttcatgaagcttggaatgcgaaacacttctttttcatcgccatcagctttgtcatacacatttcgggcaacgtgggcgaatgtatcgaggccgaccacatcaagcgttctaaaggtggcgcttttcggcctgccgatcagcggtcctgtgatcgaatcaacctccccgacctgataaccgcctttcagcatttcttggactgtcacgagaagcccgtaagtcccgatgcggtttgcgataaagttcggtgtgtcctttgctgtaacaacgcctttcccgaggacattttctccgaaagctgtcataaactttaaaatatcaggatccgtttccttaatcggaatgatctctagcagctttaaatatcgtgcgggattaaaaaaatgcgttccaagaaaatgggctttaaaatcatccgaccggccttcagccatttcctgcactgatatgccggatgtgttgcttgagacgatgcttccagtctttcgatgttcatccacaagagcgaaaattttctttttgacttcaaggttttcgacaacgacctcaataatccaatctgcttctttcagtttttctgcatcatcctccagattgccaggtgtaatataggaggtatttttcgctgatgtgaggggagcgggcttttgtttcagcagttttttcatcgcctgccggctcagcctgctgcgcacctccgaactgtccttcgtcagcccctttttttcctcttcctttgtcaaatcgttcggcacaatatctagcagcaggacaggaattccgatgttagccaaatgcgccgctatcccggaacccattacccccgatcctaaaacggctgccttccgaatgtgtttgtgcatgagatatcccccttgaacattgaatgaatagtcattcattttttgactaaaaaaaatgaaacccgtttcttctttcatcttaaaagatttccggttcgacttcaatagctaatttgttatttttttgtatgaagcctataaaagtcgggcaacttaagcccggaggtgaagggaatggtacgagagaaaaaaaatccgtcttcagcggcagtcagcgcggcgagcgtaaagggagatgccggtccgactcagcattacggcggcggaaaacggacaagtcaaaatcagcagtataaaaaacataacatgggacaatcataatgcagctgcttcccacggctgctttcactttttcaaaattccttttaacacaaacgctgcattggcaggccgttcggcaattcttctcataaagtagctgaaccagtccgttccatatgggacatacacacgcattctgtagccttccttggcgagttccttctgacgctccggcctgatgccgtatagcatttgaaactcaaattgcgatgcggggatttgatgttcggcgacgagctgtttcgtaaatgcaatgatgtcatcgtcatgtgtggcgacagccgtgtagttcccgcttaacaactgcagctttattaagctctgaaaatgaaggtccgtgcctcttttgtcgggaaacgctacagccgcagattctttataagcgccttttacaagtctgagattcggctttaagtcccgcatctttctgatatcttctgccgcccggtacaaatacgcctgaatgaccgtgccgagcttctcaaattcctgtttgcattgcctgtaaatagaaagtgtctgttcataatgagaatagtcttccatatcaatggtcacagcaacatcatattgcttcgcaacggaaagaatggcgcgcaaatgagtaagagcaagttcttctgaaagatcgagcccgattgaggtcagcttaagtgaaagctctgaattcaattgatgttcggcaatggcttgaatggctttcttgcattcctctgcgacttggtttgcttctttttccgaagctgcatactcgcctaaataatcaattgttgcacacaaaccggatctgtttagccttttgacggtcttaaccgccgattcaatcgtatcccctgcgacaaaccttcgtgctccaagccgcgttccgtatgcttttgcgaacttggtaagtgttttattttgagataagaataaaaacacatgtctcaacatccgactccctcccgccgtcatcttcaaaacacctgtatataactcccagtctgaaggaaactataaaatgaacagaaaccaaaggaggatcacaatggataatcagcagcaatctcaaatgccgccttccgttatttcgacaaaggatcatttgtatctcaatgacatgctgaactggaatttgctcgcgatgaaaaaagcgcatttcatggcgcagcagtgccaggatcaaacgttaaagcaagaactcgaccgcgtcggacacatgcatcatgatcactatcaaagaatattaaagcacctgcagccaggccagcagcagtccggctacatccaataaggaggcgccagaatgaatcagcaaaatcaaaaaatcagcaacccgcagacacctgtaccgacaacatcggaaatgaatgacagagatttcgtcaacgaattgctgacaaccgaaaaatacatgacaacagcttattgcactgccttgcacgaattcagccacgagtctctttatcaggatattcaatccatttttgatgagtcacaaaaagcgcaaagaaaactatatgatctcatgttccaatatggatggtattctgttgaagcggaggattcacaaaagctgcagcagtcctatcaaaaattccagcagaccattcagcagcagtctccttatcagcaataacaacattagtaaaaaggatacgatgttctttcgggcatctatcctttttttgtgtaaaatcagttgacttttcatttacgcttatttatatttaataagcattaactattttgtcattaaaatatatatacagtgtatgtaacagaggggaaatgaatatgaagagtgcggatcagttaatgtccgatattcaattatcgcttcaggcgctctttcaaaagatacagcctgaaatgctggaaagcatggagaaacaaggtgtcaccccagcgcagctgtttgtgctggccagcctaaagaaacacggcagcctcaaagtttctgaaattgccgagcgtatggaggtgaagccaagcgcggtgacgctgatggcagatcgccttgaacaaaaaaatcttatcgccagaacacacaacacaaaagacaggcgagtgattgatctcagtcttactgacgaaggagacataaagttcgaggaggttttggcgggcagaaaagccataatggcgcgctatctttcctttttgacggaggaggaaatgctgcaggcggcgcatattacagcaaaactcgcacaagcagcagaaacggatgaaaagcaaaacatgaaaagaggaaacggatgaaaatgagtaaagaaggcaaacaatcaaaacgaacgttattaataacaggcttaattattgccatgtttttttcagcccttgacggtaccattgtcggaacggccatgccgaaaattgtcggtgatctgggcggtttgagcatgatgacctggctgacaactgcatatttgttaacatcaacaaccattgttccaattgccggtaaactggctgatttattgggacgccgcattgtctatgtatcaggtttgattatttttatggccgcttctgctttgtgcggaatggccaacaacatgacggaattgattatcttccgtggactgcagggcatcggcggaggcatcatgatgccgatggcgatgattgtcatcggtgacttgttcacaggaaaacagcgtgctaaattccaaggtgtctttggcgcaatttacgggctggcttcagtgattgggccgcaaatcggcggctggattgtagactcgttaaactggaaatgggttttctatattaacctgccagtcggaattattgcggttatttttattgccaggggattacagggacgccagcagactggtccgatcaacttcgatatcgctggtattttcacaatgattgtcggtgtggtcagcctcctgctcgccttaagctttggcggaaaagattatgcatgggattcatggcagattcttgggttgttcgctctcgcactgatcggcattgtcagctttatcatcgtagaatcaaaagcaaaagagccaatcctgccaatgtatttatttaaaaacagaacatttacatttctaaacttgatcggcttctttatgagtatcggtatgtttggcgccattacgtttgttcctttctttatgcagggaattgtcggtgtaagtgcgtctgaatcgggtacaattatgacaccgatgatgatttctatgattatcacaagtatcatcggcggacagcttgtttataaaattgggattaaaccgcaaatcattacaggcatgctggttatggccggcggattcctgctgttaacgacattggatctcgacacgagcaagcttgtcgctacatcttttatggcgattattggtctgggaatgggtcttgttatgccgattctgacattggctttacaggaaagcttttcgaaggaggagcttggagttgtcacttcatccagccaattcttccgttctatcggcggaacattcggcattaccatgctgggagccgtaatgaatgcgagatcaggaaatctattaacagataaattggttccatatttagactctcttccggcacaggcaagctcgtttgccgcccagctaaagggtatgattgatacaaatccgcaagggctgctgcaatcactgttcagtccggacgcggtcaaacaaatccctgcggctttctcatcccatattgtgccgattttaaaaacatcgttgatggattcgctccacagcgtgttttatacgggcctgatctttatcgcagtcggagccgtattcaccttgttcttaaaacctatcaagctatcaaataagaaagcggaagaccaacaagaaaaagagaaggcggcaaaagccgttgaatcaccttcccattaatagagcaccccgcgggtatcaatccgcggggttttttattcaatcatctgggctcttccatttccgaaagaccaatcctcatcctgatttccggccagcatgataaacacatcttcttttcttacaccaagctcggaatgaatccggctcgcgattgagcggtaaagtgcttttttctgttcagttgttcttgactgtttcagtgtaaaatgaatgtatatcagttcatcagtacgctcgacttggagataaaatggatcataaaaaaattcgcttttttcatattgtctgatgacttggaaatagtcatcttccggcacattgatttcttcaatcatcgattggtggatagtcctgctcagtttttgaagccacacttcgcttcttcccgaccgtaaatgaatctgtacaaatggcatctccccgcatccctttctttacagcgtctgtccgctgtcaattgtgataatttggcctgtgagtgattcctgttcaattagtgaacaaatcaatttggcaacatcatctggttcagcaatacactgcagcagcaaagagccgatcatgcttttcattttttcttcccgtccggcccaccatctcgttgccacagctcctggtgctacaccgctcactctgatttcaggcgctaaggcgtgggccaatgatttcgttaaaccgtgcaccgctgattttgatactgcgtaaggcattgatgagccggcaccagttatccctgcgatgctgccgacgtttacgatcgccccgtccttgcttttcttcatgaacggaaccactgcccgcgcgcagaaaaacatccctttcacattgacggcatacagctcatcctagacgtcttctgtcgcagcctcaagatcatccattggaatatgccgtgtaatgctggcattgttgactaaaatatcaaccgtgccgtgtgtgttcacgattgcttgaatcatatcctgcacgtcgctgtttttggatacatctgcttggatggcgaaggcttgcccgccagctttttgaatcatttccactgtttcctccgcttctgattgcgagcgtgaataattcaccgccacaatcgccccacgctttgccaattccatactggctgcttttccgattcctgtgccgccccccgttacgagagctattttgttcaagacattcattgccgccactccttgctgttgactaaagtatatttctgattccattgtaatccagctttgatgttacgtataatgattgttaaagatactagatatcactcagattgatagtaaacgaacggaggagttcaaaatggaaagcggagatttacgtgtgtttcaaatggtagctcgtgaagggaccattacgaaagcagccctgcagcttggctatgtacaatcgaatgtcacggccagaattcaacaattggaagctgagctgggtaccacactgtttttgcgccataatcggggcatgacactttctgcaagcggaaaattgctgctggactacgcaaataaaattataggccttcttgatgaagcgtctaaagcgctctcatcctccgcagaaccaagcgggccgcttatgatcggctgcactcagacaaccgccgcggtaaggcttccaaagcttctggcatcttattatgaagaacatccaaacgtccagctgtctttaacaacaggacatacgcaatttctccttgataaagttcttcgttatgaattggatggcgcgtttatcggatgcgaatgccatcatcctgagctcgaatcctatcctgcgtttgaggaagaaccagtagttgtttcggctgcctccgtgcccgatgttgaggaagccatcacaaagccgattctcgtttacagcacaggctgttcgtatcgagaaacacttgaaaaatggctgcgttccgtcggtgtcacacagccggtcattatggaatttgggacgcttgaagcaattatcggcggggttacagcaggtcttggcatctcgttgctgccaagaacggttgtgcagaaacatgaagcagaaggatcaattcgattgtacccgctgcctgaagctctcagccagatgaaaacagagtttattgttcgaaaagattcgtttatcagcagcgcgctgagaacctttatggattcctttacgccagttaaaacggctgaatcacaaaaaagcagtctgctataatgaacagactgctttttggctattgtttgtttcgatgcgcttcatttaattccttaatatgctgaatgatctctttaatgccctgcttcgcgtcggggtatgtcgcattccaatgcttagcgagcggaggcatgcttttggctatatgggtgtacaaaatccattgcttcacttcttcttttagctcatcgtttgtttcaccaagcagaagctcagtatacttctccagcaatccatcaagctgctcctgaagtttttgttccattttccatcttcctttcgaaaaaacagcaaggagctttctcaattgaaagctccttcgctgcgttatttatccatgtgatgtgaaagccgcttcctggacaatgcatctgcccctgccatgaggaatgcaaagaggcgttccgaagagcgggtcctgtgtaacctgacagttcatagaaaacacattttgcacaagatcacaagtgatgacctcttccggacggccttctgcataaatccgtttatcttttatggccacaagatgatgcgcatagcggcacgccaagtttaagtcatggagaaccataacaatcgtccggtcttccttttcattcagctcaaacagcaaatcaagaatttcaatttgatgcgtcatgtctaaatacgtcgtcggctcgtcaagaaggatgatatccgtttcctgggcaagcgtcatcgcgatccaagcccgctggcgctgtccgcctgacaaagaatcaacggcacggtcagccatgtcctcaagctttgttgctttaagcgctctttcaactgcttcctcatcctcttttgaccactgcttcagccagttttggtaaggatatcttccttgcttcaccagctgatgcaccgtcagcccctctggagccgaaggaccttggggcaggattgcgagctcttttgcgacttccttcgtcggaagcttggcaatcgctcttccttccagcagcactgaaccgcctctcggcttcatcaggcgcgctaatgaacgtaaaagtgtcgattttccgcagccattgctgccaataaatacggtaatttcacctttgggaattgttaaattcaactcatcaataataacggcatccccgtatcctaagctcagcgtttctgtagaaattgcactcatacccataaccgctcctttttgctggctttttagcagcactatgtattgcacgttttctatatacatgcttttaagtcaattgtcatcaatgcaaatgattccgatattcagccatttgatatggtcatatatccctcattgtagcagaaaacactgactttgaaaatcattttcaattagttttatggacataattgacgtttatgggttttttatcacaagattacttcttgatttctctgatggagccgtccttcagcttcaattttaaatcgatatgatcataatgactgtccagattaaatgctgccagcacactgtgtatcacttctgtttcagccatttggtctgtcacggaaagctcgctcaaaatcattttcatctcatctaacgcttcttctccttcctgattgacaccggagagcttatcctgtatttccgctttttcctgagtcccgttctttgtatagattccttcataacggttatgctcaccatccccgtagctcacacgaagcgaaaaattactgtagggaacggacttcagctgggtgacggctgtattttctccttctgcctgatgctggtcttcattgaaacggcagcccgcaatcagaaccactgcgagacatacagccccggctgctctgatcaaatgcatatgtttcccccctgtaggattccatttattttaggtatatccagagaatgaaatcctcattcagagaagaattgaaaaagccggggcatttaacgccacggctttttctttaagattcggtcatttgtaaaaaggtttcggcgtcacgcacagccagcttgatggcattctcccagaaatcgcgctttgtgatgtcagcgcccaaatgcttcatcgccaaatcctccactgtcatagaagccgtatcgcgcaatagcgccatatacttctcttcgaatgtgtctttttcttcaagcgccaacgcgtaaataccaagagaaaacaggtagccgaatgtataagggaaattgtaaaacggcaccctcgtgatgtgaaaatgaagctttgatgcccaaaaaagcggatgatattcttctaacgcattgcagtatgcctctctttgcgcctcttccatcagctcattcaagcggctggccggtaccactccccgctttcgttcctcgtagaatctcgtttcaaatagaaatcttgcgtgaatgttcatgaagaacgcaacgcttctttgcactttatcctccagaagaacaagcttttcttccctcgtctcggcctgctggacagtcgcgtccgccactatcatctctgcaaacgttgaagctgtttctgcaacgttcatggcgtaggaacggtttaacggcctgacgttgagcattgcttcctgatggaacgcgtgcccgagttcatgcgcaagggtagagacatttgaggcgcttcccgaaaatgtcatgaaaatccgggattccccgctgtccggaaaactggtgcaaaagccgccgactctttttccgctcctgtcttccgcctcaatccagccgtcccgaaacgctttttcagtgaatgaggacagctttttgccaaacgttgaaaactggctggtaatgatatttgcggcttcatcatacgaatagacctttccgtcagaaccgatcggtgcctcgacatcgtaccagctgagtttttcaaggccgagcatggatgctttccggttcaaaaactgaacgaacggcttcttgttttcagtgatgacctgccacatcgtatcaagtgtttcttttttcatcctgttaatttgcagcggttccttcaggacattctcccagccgcgcgctttataggtttcaagccggaatcccgccaaatgattcagcgtgctgctgaaaatatcttgcttgctctcccaagcttggcggaaacgttcatatactgtttttctgacagtacggtcttgatgatccatcatattctccgcctgaccgacagacaattgcttgttttcaccgttttcctcatacgggatcgtcattttcccgacaaccatattgtataagtcactccaagcgtgatatccgtccaccgcaaggtttccgatcagtttttccttaccggggctaagcttttcggcaaccctctgtcttctttcatttaatatgtaagaaacatcgcgcaatcccggttttgttaacaattcattccacacgtcttgattaatgtccacaagtttatgatctaatgtaacgagcgacgattgaaaatctgcggaaagccgattcatgaggcctgatgctctatagccttttgatcattgatattctgggcctggaggcaagcaacaaaagcgccggcctgctgaagcttgacggatgtctgttcgaataaatcaagcaacgcggtcagcccttcagcctcttcaggcgattcaggcacctgaaacgcatcagtcctgtcttgaaatgcacgcagactttgtgacagcttctcaatataacctttgaattcttccgattggctcccgcccttaaaaaatgaatcaagatcccatctttggcctaccccttgcagcgccatatcacaaaacccctttccttctttcgttctattatagaacaattctgaattattgtataaaaatttctattacaggcgtcatttcgtgttcaggatagtacaatagctgtagcagtttaataggagggttaggatgaataaaaaaatagccatcgtgacaggagcgtccagcggcttcggtctgctggcagctgtaaagcttgcccgatcatttttcgtgatagccacatcaagacagcctgaaaaagcggaacagcttcgagaattggctgcagcacacaatgtgtctgattctattcacattacagctctcgatgtcaccgatgaacaatctatagtctcattcggaaaagctgttagtgcttacgccccgatcgatttactcgttaacaacgccggaacggcttatggaggatttatcgaggatgtgccgatggaacatttcagacaacaatttgaaacgaatgtcttcggtgtgatccatgtgacaaaaaccgtgctgccttacataagaaagcatggcggcgcaaagattataaacgtgagcagcatcagcggactgacaggattcccagcgctgtcgccatatgtttcttccaagcatgcattggaaggtttttctgaaagcctgcgtatcgagctgcttccgttcggtatcgaaaccgctttgatcgagccgggctcatacaagacatcgatctggtcaacgtcattatcaaattttatgtcggtgcctgctgacgattcagcctatcatcaatactataaaaagatcctttcctatgttcaaaaaaacggagaagaaagcggagatccccaagaggttgccgacctcatttatcaattggcaacaaaacagcacataaagaatttgcgatacccgatcggaaagggcatcaagctcaccctgctgttccgatcgctttttccttggtctgcgtgggagtctatcctgaagaaaaagctattcagctgatctaaattataattattataatttagtattgatttttatttagtatatgatataattaagtcaacagatcacaaggaggacgttatcttatgaaaactgaaaacgcaaaaacaaatcaaacattagttgagaattcactgaacacacaattatcaaactggtttcttttatactctaagctccaccgtttccattggtatgtgaaagggcctcatttctttacattgcacgagaaatttgaagaactttatgaccatgcggctgaaacagtggataccatcgctgagcgcctgctggcgattggcggacagcctgttgccacagtgaaagaatacactgagcatgcatctatcacagacggcggaaacgaaacatcagcatcagaaatggtacaagcattggtaaacgactacaaacaaatcagcagcgaatctaaattcgtgatcggcctggctgaagaaaatcaagacaatgcgacagcggacttgtttgtcggattaattgaagaagttgaaaaacaagtgtggatgctttcctcttatttagggtaacaaaaaagctgaaccttaatcgggttcagctttttgttttttcttagcttgaactgctttctgtctgcttggtcagtgttgcgttcaacgttttcgtttttccctttcgcagcacttggattgttgttttatctccgacttttaagtctttgtaaaggatctgacggatatccgcactgctttccacgtctttaccgtttagtttgacaatgacatcctcagatttaatacctgctttttctgccggcgaatttgcttgaacttcttttacataaacacctttgcccaattgatctccaaacaggccgagcgtattttcctgataggtttcaggaacttgtgacatgtcaatcatctgcacgcctaaaaacggacggtccaccttcccgttttgcagcagctggtcaacaatcggctcgacatcattgcttgggatcgcaaatccaagtgattccacgccgctttcgctcaccttcaagctgttgatgccgatgacctggccgcttgcattgattaatgggcctccgctgttccccggattgatcgctgcatcggtttgcagcacgttcatttccaccgtcccctgtgttgtatccacatcaattgtccggttcagtccgctaatgataccttgtgtcactgtaccggaaaactgctgtccgagcgggttaccgatagcgattaccttttcgccagtgcgcagctgtgaagagtcaccaaagctcgccactttttttacattcttgccgctgatttccaaaactgccaaatcagtaatggtatcgctgccgacaagcttggcagtttccgtttctccgttgtatagcgtaacagtcagcttgttcgcgccttcaacgacatggttgtttgtaatgatatacgctttatcgctgtcttttttgaaaataacacctgacccggttccgctttcactttctgagctggagcctcctcccgtgccgaatgtgttattttgagaggtttggatatttgagattccgacaatcgtaggctctaaatcctctaccatatcagcgatgtttgatgcgttcgttatcggcgccgttgtaaaattatcagactgcacctgtttatttgcggaagcggtttcggtcgcctgattttggtctgacggcagataaggcgcgatgccaagcatgaggcccccgccgataataccgcctaaaatcgggctcagccatgcggctctccgtttcttttcttttttcacagccgtttcttgcttttccatttctaaagcagaagccgtttcctgccgtcccgcttcatacgacacaggcgcgtcaagcaattcttgttcagaatgtccaatcagcttctggttttctgtattctgctgttctgtatgtgaaggttcagtttgatgttgatcgttttggccatcacgtcgataatccatgttcttacactcctttaacggttattcatttatcgttacatattcatcgcatgtacaagttcaattgtcccaataatgaggagaaaagcaaagcaccaaaatagaatatgtttgatcatcctacatcttcctcgctctttttctcttcctttcttcccttaaccatatcataaacaaacattgtgggataaaaatgaaaagaatatgtgaaattatgaaaattgcctgccgtatgttaaaactagtttataatgacgttgaaaggatgtgaagagccttgtcatacaccatttatctagttgaagatgaggataacctgaatgaactgctgacgaagtatttagagaatgagggctggaacattacatcttttacgaaaggtgaagacgccagaaagaaaatgacaccgtctccccacctatggattctcgatatcatgctgccggataccgacggctatacattaataaaagaaatcaaggcgaaagatcctgacgtgccggtcatttttatttccgcccgagatgcggatattgacagagtgcttggcttagagcttggcagcaatgactacatttcaaagccgtttttgccgcgggagctgattatccgtgtgcaaaagctgctgcagctcgtatataaggaagctcctcctgtccaaaaaaatgaaattgccgtctcctcgtatcgggtcgctgaagacgcccgcgaggtctatgacgaaaacgggaatatcatcaatttgacgtcaaaggaatttgatctgctgctattatttatccatcataaagggcatccatactctcgtgaggatatcctcctaaaagtgtggggacatgactacttcggaacagaccgggtcgttgatgatctcgtccggagactgcgcagaaagatgcctgaattgaaggtggagacgatttacggtttcggctacaggatgatgtcatcatgaaaaacaagccgctcgcgtttcagatatgggttgtcatatccggcatcctgttagcgatatcgattttactgcttgtgttattttcaaacacgctgcgagattttttcactaatgaaacgtatacgacgattgaaaatgagcagcatgttctgacagagtaccgcctgccaggttcgattgaaaggcgctattacagcgaggaagcgacggcgccgacaactgtccgctccgtacagcacgtgctccttcctgaaaatgaagaggcttcttcagacaaggatttaagcattctgtcatcttcatttatccacaaggtgtacaagctggctgataagcaggaagctaaaaagaaacgttacagcgccgacgtcaatggagagaaagtgttttttgtcattaaaaagggactttccgtcaatggacaatcagcgatgatgctctcttacgcgcttgattcttatcgggacgatttggcctataccttgttcaaacagcttctgtttattatagctgtcgtcattttattaagctggattccggctatttggcttgcaaagtatttatcaaggcctcttgtatcatttgaaaaacacgtcaaacggatttctgaacaggattgggatgacccagtaaaagtggaccggaaagatgaaatcggcaaattgggccataccatcgaagagatgcgccaaaagcttgtgcaaaaggatgaaacagaaagaactctattgcaaaatatctctcatgatttaaaaacgccggtcatggtcatcagaggctatacacaatcaattaaagacgggatttttcctaaaggagaccttgaaaacactgtagatgttattgaatgcgaagctcttaagctggagaaaaaaataaaggatttattatatttaacgaagctggattatttagcgaagcaaaaagtgcagcacgacatgttcagtattgtggaagtgacagaagaagtcatcgaacgattgaagtgggcgcggaaagaactatcgtgggaaattgatgtagaagaggatattttgatgccgggcgatccggagcaatggaacaaactcctcgaaaacattttggaaaatcaaatccgctatgctgagacaaaaatagaaatcagcatgaaacaagatgatcgaaatatcgtgatcaccattaaaaatgacggtccgcatattgaagatgagatgctctccagcctctatgagccttttaataaagggaagaaaggcgaattcggcattggtctaagcatcgtaaaacgaattttaactcttcataaggcatctatctcaattgaaaatgacaaaacgggtgtaacataccgcatagcagtgccaaaatagactgtagatgttttgcagtctatttttttatgtgaaagaatagccgttaaaatctctgtaatttgttttgagcggctgtttgcattgatgaacccattttttctctgacaaggtctgcttcggatatttgactttctccactttgattcctctgtttcgcaagcggctgatcatttcgtccaattctctcattctagattcaccctttcgcttgagctttgaccattcggtcatctcaatttataatataaataatacatgataaaaaaacaagttacaataaggttaattttataacagacggtgtgactatatggtcatatcctagcaggcctccgggctccgaaagggtggaaccattgaaggaaaaagaaaaactgattattgaaacagccttaaaactatttgcccaaaaaggatacaactcaacatcagtccaggaaatcgcaaaagaatgcaaaatatctaaaggcgctttttatatttattttccttcgaaagaagcgcttcttctctctatgctgaactactattatgataaaacgtttacccgaattttaaatattaaaacgaagggcgacagccccagaacggcttaccgtaaacagctgaccgtcctctatgaaaacattcttgaacacaaagattttatcagcatgcagttgaaggagggttctctgccttacacagaagaagtggagcaatgcgcaaaaaaaatccgccagtcctcacttcaatttcatatcgacagcctgctgaacatctatggaaaaaaagcggaaccgtacactgctgagctttgttttttaatagagggcatcagccagatttacctggaatgcatgattttgctcgggtacactgtgaagccgtctcaattagctgatatcattatgaatcgaattgatgatatggtaaaaggcatgtctgaacgaaacgataagcctttcatcacattggaagaggcgagctctttattcggacctcttacgcacggacggcctgacccgctgactgaatcaattgtgaaaagcctacgtgacaaaattaacagcttaaacacaaactcctctcttgaattatcggagagcttggacatacttgaagcagaaatgaagaaaaaaacaccgaagctggcgatcataaaaggaatgattcataatctgacggagtctgaagctctcgccaaagatgcggaacagcttaaatatttattaaaacagcaacatatttagaagaacggctgcttaaaaagcagccgttcttcctattacgcctttggttttaccatgtcttccggcttaaccatttcgttaaattgctcctctgtcagcaattcaagcttcaaagctgcttctttgagcgtcaatccctctttatgggcaagcttggcgattttcgccgcgttttcataaccgatatgcgggttcagcgccgtaacaagcattaatgaatttgacaggttttcctgaatggtttctttattaggctcaataccgacagcacatttatcatggaatgaattcatgccgtcactgagcagctgcacagattgcaggaagttgtaaataataacaggcttaaacacgttcagttcaaagttcccctgactcgccgcaaagccgattgtcgcatcgttccccatgatttgcgctgcgatcattgttaacgcttcgctttgtgtcggattgactttaccaggcataatagagcttcccggctcattttcaggaatgacgatctccccgatgccgcagcggggtccgcttgcgagccatctgacatcgttcgcgattttcattaagtcagccgcaagcgcttttaatgcgccatgcgcataagtgatttcgtcatggcttgtcagcgcgtggaatttattcggcgagctgctgaacgtttggccggtcagcttagtgatctcttctgagacaagctctccaaactctgggtgggcgttgatacccgttccgacagccgttccaccaattgcaagcgcacgcattttatctgtcgcttccaaaatcatttccttcgaacggtccagcatgtgaacccatccgctgatttcctgtccgagggtcagtggcgtagcatcctgaagatgcgtgcgtccgattttgacaatatcattgtatgcttttgctttttcatccagtgtattgcgaagctgatcaagcgccggcacaagctgctcgtaaacagccaaaacagcggcaacatgcatcgcagtcgggaatgtgtcgtttgagctttggcttcggttcacgtcatcatttggatgaatcgtttgatcagagttcttctcttttaataaagcagtcgcacggttggctaccacttcgttcatgttcatattgctttgtgtgccgcttccggtctgccatacgacaagcgggaagttgtcatcgtacttgcctttgagcacatcatcacaaaccgctgcaatcgcttctgctttttcagcgtccagattgccgaggcgtttattagctagagcagtgcttcgttttaaaattgcaaacgccttcacaacacgcatcggcattttttcagaaccgatcttaaagttctccttgcttcgctgtgtttgggcgccccaaaatttatcagcaggaacttttacttctcccatggtgtctcgttcaattctgtattccatttatgtatccctccataacggttgcttcaatagatcataattcgccaatgacacaaaaaatcctttttatttttcgatcttggcagattttaattttaattcaagatatacgcgggaatcctttgaatatttgtattttggatttgtcctgccgtactcctttgatgtataagagacatcataatgctgttcaaatgatctaatgagctgttcaatttcttcttgttttccagctagccttacctgtgccacttcgtatcctccgctttcataaaaaaacttactccatgaaatactctaacacagtatatcatttttttaacaggaaaagataacctctactaaggttttggataagaggtgacctcattggaacaaacagagtttaaggaatatatacacgataatttagcattggtgctgccaaaattaaaagaaaacgatgatctggtgaaaaacaaaaaaatgcttgcgaacggactggttttttactatctctatttcagtgaaatgactgatgagaataaggtgtcagaagccattaaaactttgattaaagatgaggagaccttaacgcttgaccaggtcaaaaaacgccttgaccagcttgacgcaagacctgttgaaactgcaaaaaaaacgattgaatcgattctcaacggcaattgtgctgtgtttatcaacggattggataaagcctatattctgaccacaggaaagaaaaaaacaagaagcctgacagagccgacaactgaaaaagtggttcgcggcccaaaagtagcgtttgtagaggatattgatacaaatctcgctctgatcagacaaagaacctctcatccgaaattgatcaccaaaaaaatcatgatcggcgaaaacaagctgaagcctgcagccattatgtacattgaaggcaaagcaaaaaagtccgtcataaaagaagtgaaggcgcggcttaaaaatatccagctggaagatatccaggacagcggaacgctcgaggagctcattgaagataataaatattcaccatttccgcagatacaaaatacggaaagacctgacaaagtatcttcagccctgtttaacggccgtgtggcaattttggtcgacagttcaccatttgtgctgctggtgccggtttctctcggcatcctgatgcaatccccggatgactactatgaacgctggatttcagcatctcttatccggtcgctgcgctttgcttctatctttatcaccttgtttttgtcatcgatttatatagcacttgtttccttccatcaggggctgctgccgaccgcactcgccgtcacgatttcggcgaacagggaaaacgtgccgttccctccgatatttgaagccctgctgatggaagtcaccatcgagctgctaagggaagccggactgcgactccccaatccgctcggacagacgatcggcctcgttgggggcgtagtcatcggacaggctgctgtagaagcgaatctcgtcagttcgattttggtcattgtcgtcagtgtcattgccctggcatcctttaccgttcctcaatacggaatgggtctgtctttccgggtgctgcgttttatttcgatgttttccgccgctattttagggctatacggcattattttatttatgcttgtcgtttatacgcacttaacgagacaaacgagctttgggtctccgtatttttcgccaaacggattctttagcctgaaaaatacggatgactccattatccgtctcccaattaaaaacaaaccaaaagaggtgaataatccaaatgagccaaaaacagactccactgaaacttaatacctttcaaggtatttctattgttgcaaatacaatgcttggggccggacttttaacattgccgcgagcgctgaccactaaggctaatacgcctgacggctggatcacgctgatattagaaggtttcatttttattttcttcatttatttaaacacgctcattcagaaaaaacatcaatacccttcactctttgaatatttgaaggaagggcttgggaaatggatcggcagcatcatcggccttttgatctgcggctatttcctcggcgtagccagcttcgagacacgggcaatggctgaaatggtgaagtttttcctgctggagagaaccccaattcaagtcattattttaacgtttatttgctgcggcatttatttaatggttgggggcttaagcgatgtgtcgcggctgtttcccttttatttaacggtaaccattattattttgctgattgtgttcgggatcagttttaaaatttttgatatcaataatttgcgtcctgttttaggcgaaggccttggacccattgcaaactcccttaccgtcgtttccatctcttttttaggaatggaagtgatgctgtttcttcctgaacatatgaagaaaaagaaatacacgttcagatatgcgtctctaggatttctgattccgattatcttatatatccttacgtatattatcgttgtcggagctttgaccgctcccgaggtgaaaacgctgatttggccgactatttctctctttcagtcctttgagcttaaaggcatatttattgaacggtttgaatcctttttactggtggtctggattatccagtttttcaccacatttgtcatttacggatactttgccgctaacgggctaaagaagacatttggattatcgactaaaacaagcatggtgattatcggcataacggtcttttatttttctctctggccggatgacgccaatcaagtcatgatgtatagcgattatcttggctatatttttgtctccctgtttctgcttccgttcattctctttttcattgtagctctcaagaggaggattacaacaaaatgaaaatccggattttatgtatgtttatatgcaccctattgctgtccggatgctgggacagtgagaatatcgaggaattaagcttagtgatcggaatagggctagacaagcctgacgatgaaaatttagagctgacacagcaaattctcgtgccgaaaataatcagcgccaaggagggctcttcatctgatccgacacagctttctatcacaaagggtaaaactgtccatcaaatgatgagaacctctgcattaaagcataagcctacgttttcacagcatttgcgtctcattctgctttccaaaagcgtgattgcggatcaaattggaatggacgccattattaaccagtttgtcagagacaacggaacaaggaggagttcctacgtctttatcaccaacggccgaactaaggatatatttaacatgaatgatgaaggcgaacccgcatccaacgtgatatatgatctgacagagaataataaggtgacgatcagaacgatggagccagttacattgggggagatctcagaacacttaacctctgacgattcattcctcatccctcatgtcggtaaggaaaacggcaagctcgcgataaacggagcctctatcataaaaaataaattatggcaccgggacctcaccccgattgaggttcaaaatatcagcttattttcaggcactgtcgagggaggcgtcattgacttgaagcgcgatggccatctcttttcttatgaagtatattcaagcaatcggaagatcaagacggcatacaaggacggaaagttcaaattcaccgttacccgcaatattgaaggtcgtctatctgaggactggaatcccaatgaagactcgtttaaggattcatatattaaaagtattgaaaagacagtcgaaaaacgagtacacgaaacagtaacgtcatttattacagagaagctgcagaaagagatcaaagcggacgtaaccgggctgggaaacgaggtcagaattcattatcctcaaaagtggaaaaagatttcaagaaaatgggatgatgattatttcagcaatgcggaaatagactaccgggtcaatgtgattgtcagagacttcggaacgaaaggcgcaaacaaatagcagccgcctaattcacgagatgatttcggtgtgcgtacaccgccgcctgcgtccggtcactgacatccagctttgataaaatattcgtaatatgtgttttgactgttttaatcgtaataaacagttcctcgcctatttctttgtttgtctttccttctgcgatcaggcagagtatttcgagctcccgttttgtaagcgattcatgcgggagcgcgttttcacctgagtggcgcagcctggataatacttttcccgccacttttgactccagcttcggctctcccttgcttgcggcgcggatggcatcggcgatttctgccgcttttgaggttttcaacagatagctgagcgcgccagcttcaataaccgggtacactttgtcatcatcaatgaagctagtgagcacaataattttcgggtcggaaagctcccggcaaatttgctttgtagcttcaatgccatccatgccctccatgacaaggtccattaaaatgacatcaggcgacagttccacagcaagccgaacaccttcgctgccgtccgatgcttcgccgatgacttcaatatcgggctgcgcctccaaaaaagccgcgagccccattctgaccatttcatgatcatcaatcaataatactcgaatcacgttcgttctctcctttttcttccggaaaaatcgggaccttcacttcgatttgagtgccttttccttctactgaaatcacttcggcgacaccgccgatttcacttgcacgttctttcatagaattcaagccgtatgaggaggctttcacctggtccattttaaagccttttccattatcaatcaccttcagacggagctggctgttctttatgcccagaatcacggttacttttgacgcttttgaatgtctaaatacgtttgaaagggcctcctgcacgattctgaacaagtggtcttcaacacccttggatatcgctgtgtcctgtatatcccactcaatatcaatcggctgcttttttcggaactcgtccaaaagctccgtaaggccctccttcagcccttttccttcaagggtaacaggccgtaaatggagcagcagcgccctcatctcattttgggcttcgcctgccatatgctcgaccatcctgatccgcttgactgttttgtcatcagcatccttgacatgttccagcacggctgatgtcatcatcgatatggcaaagagctgctggctgaccgcatcatgaagatctctggccaatcgctggcgttcttctgagataaccgacttcttcatttgagcctgccattccgcacgttcattggaaagtttctggagggatgcgacttgaagctccacgcgcttcgccatttcgttcagctgatcagcagccaggccgatttcatcatcaccgagcggcggtatccgataagcgaaattgccgttttcaaaggttaaaatggattcaattaatgtatcaatccttgtcttcaaccggttgccgtacatataccctgaggcgaaaccgacggtcacgctgatcagaagcaaaatcaggataaacggaattccgaaccagcttgatgacagcaaaacaagcggatcgagccgatagtaaaacatcataaaggaaatcaggcaaacaaaaaggagcaggctgattcccgttgtcatgcggatggcgcgccattggaggctggcaagcattttttttctcatacgtacttcacatccacatcaccgataaataaggaaacggacacttttacccggcgctttgactcgctaaaatcagttgacgcggcatataccttcgtgcttaatccgcttttcttcgagccgatcagattaatgtctcctataaaaacagccgagctgacagccacttcaaggtccgatggtacataaatatcaacgttaccaatgactccgctaatgacgattgtactttctccctcgggaatcatcgctttagataaatcgattttgatatcaccgataaaaccagagacatttaaatcgttcaggtcaaacggctgcttcatcatttgcagctcaccgataaaaaagctgcgcatgtcgggatgttttacatcttttggcggctcatgatgttcttttttattgagattgacctgtttctcattcggttcaaatatcggcttccctttgataagcctgtagccggcgtaaatcagaaatgcggcaaacgcatagccgaataaattaaaggtgatgctgaagaggtttttcaaaaatagaaacgcggcaaagatatacatgacggagccaagccaatcacgggaatattttttaaggaaatagccggcaatcagaaaaaagagcggccaaaacagcagatcgcctattccgataatttgcaaaaacatactgatgccgaataaagcaatgatcaatccgagaagctgtttttttgtcattcctggtgtccgcctcctttcttctgcctagtgctaccgtatcgctagatccccgctgtccgttttgatgtcgattggatgccggccgcttccttgcgtgcctgtgatgtgatgctgttctttatgtcctttatcagcaaatgaatacggcgaactgacgtcaccgcttgctgataaagcattgactgcaaagctgccattttggggaaggcttacattagcatcaccgcttgtcagcgtgacagatacgggaccggttacctttttcaatacagcattaaaatctcctgaagtcattttcacatcaagagagcctgatacatgaaccagatttgcgtcccctgaagctaaatcaatgccggctgttttggagacggtatttgaaatggaaacatcccccgatgatgccttcactttcagatcttgaatgcggacgtccgtcacgctcgtatttccgctcgcagatactgcgttcagcccggaaagcgcaagatggtcattcccggccacagacacgtcaccgcttgaggttcgtactgccagatcacctttataatcatacggaagcctgacgataagagttgaacggttaaatccattcaaaaattgaaattctttttcctttacggtcagctccagttttcttttgttttcagtaacaaataactttcctgagtctcctgaaatgcctgccgatatgtcacttcgttcttccgctataatccggacatccttgctatccgactcaatgaccatgctgtcaatgtcccgcggcgatgcgctggctgaatcagcttctgtgccatttatgaaacctaggcctgcagcaaacacatcttttacgacgacggcgaaaaaaaccagaataccggcagtgatcaacagtttgccaagcatttttttcattcggtttcatccttctcattcattctattataaaggaaaagcttgcgaattgatacgtgcggaagggaaggacttgaccgcaaatccttccccgttccgcttattcatttgccgcttttgtctggtctgatttttgcagtgaaagtgtccgcattttttcaatctccgcttccacatcgtctgcgaattctttacgtgtaagttctgtgccggcttccgctgactttgaataattcgcgcggatttccatttcttcaatacgattttcaatacgtaaaaattcacgatacgcgctttcactgtcaattttgtcaaatgtcgtattcatatgctctttagctttcgccgcatttgcccgcgcaatcagcgcctgttttttatcctttacgtcctgaagctttgtttcaagtgcagccagctgctctttcagatcagccagctgactgtttgcctgttcataggaagctttatgctcagccgccttcccttctaaatacttcatttcagtcagcgcctttttcgccagttcttcttcacctgcgtcaaatgcgagctgtgcctgatttttccgtttgccagccacttcagcggcttcttcatattttttcttaaattgataggcaatcgtgtgctgtttcacaattgtttgctttgcttttgcgatgtcgctttccatatcgcgtacatattgattcagcatcacctttggattctccattttatcaagtccttcatgaactgacgcaacaaacatgtctctgattctttttaataccatacctgattcctcctaatatattgatattattttttcttcaaaaattcttcccattcgtcatcaaagtgagattggtaggcagcagaagccggttcaggatcaaaagatgatacaccgttatcagctgatccgtttttcatcagcttccagccgtaatacaccatagcggccgccaatgcgattccgacgacaaacggaagtgagcagatgagcataatggctccgataccgcccacgatgattcccgtgatggtttttcccgcggcaaaccttttgattcctgcgtatgtcatcaagctcccgatggcgagcgggatgataaagccgaagcttcctcctccaaaaaagacggagatcccaaatacaattaataagaatccgcctattgttttcttgtttattttcatgcagatcctcctttcgttttccttgtcttcatcttatacaagttggaagatatgcaaaacgaatcagagattgatttttatataagaccggagtcgtatctcgcaccggacccattggcacaaaaaaacgccatgcacgaggcatggcgttttaaaaccctttacagatgaacacttgcttccctttctttaattaggtcggacctttctgctttggccaattttgtaaacagcaagattccgatacccgcaataatttcgacaatcccaccgacagcgatcactttacctgagccgaaagcattagcggcatacccgcaaatgacagctccggcagggatcgaaatatttgagatcatatgtataacggcgtaaacctgcggctgatcctcactatccacagacgtctggataatcgtgtactcaggaacattaacagcactgactgcggcaccaaaggtaaaagcagcgaaaaagacgagcggcaaaaaggtattcatcccggtaataaagaaagcaaatccttcaataatgccggcagtgacgaataacaagccgtacctgtttaccttgactttcgccagcacaaaccctaataaaaacgcgcccgcggcggtggtggcctttaaaagcgagtatacgatcggctggccgtttaaatcttccgcaacgtatacggcagagagcgcttcccatggggcagccgcgaaattcataaagatacagtaaatggcgagcggatataaaatctggtgttttctgacgagcctaaagccgcgtttcagtcttccgatatatgtgcctctctgtgtaacaaccgcagactctgattgagattcaaccgcagtgtacttaataaaaagaacgagaaaacctgacaccaaatagagcacaagtgcgataagcatggtataagaaggactaataaatgtaagaaaagcgccgcataatgtgacagccccaagccggacaatttgagcggaggattgcagcacagcgtttgctttttgaatgccctgttcattgacgatttgaggaatcaaagcgatagaggcgggattgtaggcagctccagtagctgaatgcacaatcataagcgtcatgacaaaccacagcggagagaagcccgcaaaatgacatagagggataatcaaaacaatcgccgcccttgtcagatctgaaaagtacatccaaaatttcagcgtggtctgtttcataaaaggccccgtcacaggcgccagaacggcttccggcaaaaacgtgacagcaatcaataaagcagtgccgatcgcacctttgccgtcataaattaaaaaccataatattgaattaaatgcgaacatatcgccggatatcttgactattcttgagaaaaacagataattgaaatttctcttccagatgctatcactttcaattaaattcaccatccatcagagccccccgttgcctattttttacatctatttattacaatatctcatttttccatttttcagtcaataattcataaggttcattttttgtcgtaaaatgggaaattgacagagtgaaaaacaaaaaaagccggcatgtatttgaacacgccggctttccttttcactttttatgattcgctgctgtttcggtcccgaaacacaatggcacttctttcatattctacatcgccaataccgcttcttgcattcacaacccgggcggcggcaaagaaataatcggacagacgattgagataacgcagcactgtttcatgaatctcctccgatttcatcagcgccaccactcttcgttctgcccgccttgtaatggtgcgtgcgatatggagaagcgaagcacactttgatccgcctggaagaataaatttcttcagttccggcgcttctgctgtataggcatcaatgcgcgtttctaaaaaggaaacagattcttccgttagtttatagtcttttctttctgtgacgattgccagatcgcctccgcagtcaaacagctcatgctggatggtcagcagctcggctgtcagatcttcaaagccgggctgcccggaaagctctgccaaagcaagcccgataaagctgttaagctcgtcaatcgtgccgtagctttcgacgcgtaggctgtccttgtccgttctgcccccgactaagcccgtttgtcccttatcgcctgtttttgtatatagtttcataccctgaatctcctttacagacttattcaaacaactcagcagcctcttttatacattcagctgtccctttctttatcaattggttcagccgctgttctatgttttctgattgctgagtttgagtcgcggcgatgagaatatcacctgtgcctcctccgtctcccagcactttcgtccgttctgcttcggcagccataagagctttgatgaagaattgatctgccgcatagccgttaatcaaaatccaaatcgaaaagccggtctgaacgcatatgaaaacggataactctccgtcttcatatgttcgatacacgaaacggtcaagtctttctgaagaagccatcgcacacgtctcctgcagttgaaaaccgctttctgaaagacaggccgtaagtccttctatcggatctggctgatctggcagccgtttatggatcagcgtcctgctccacgaaaaccctgcaccgataggcgtggaggacaatgttcgaagcgggatttccgtttgcagaagaatgtcatcacgccccgcttggagcaatgcttcaaatgggatagactgccgcttcacgctatctttttcaggctgaatcacaatcatcggtttaggtgagctttgatgaaccaaggcggtgacatctgtatcgtacaccgcctttatgctttgttctgtaacagcatattccggtttttgcttaggcccggcggtaccgtttttcataaacatgagcccatcacagtacaggcttgcggtgttcagatcatgaaaaacgctgacagctgccaatccgctttctctcgtcaggcgtttgatcagatcaagcaggtctttttgataagccagatcgagaaaattagtcggctcgtccaaaaataaaatacgcggctgctgcgccaaagcttgtgccaaatacacccgctgctgttcccctccgcttagttcgcgaatcggcttttgcgcaaaatcggccactcctgtttgctccattgcttcctgtacaatggcttcacccttttcagtctgctgtctgaacagccccgtttggaatggatatctgccaaaggctacagtttcttcgacagtaaaggtgaaggcttgatccattttttgcggcaggacagccatgatttgcgccagttccttcggtttatagtccgccagcagttttccggccagataaaccctgcctttcttggccggcagcgtacctgtcagcaagtgcaaaagcgtggtttttccgcttccattagggccgagaattccaagaaattctcccttctccactgttaagctgacattgttgattaggcggctgtcgccgtatcctcccgacagcccttctgccttcatcataagcttctccccccgcgatgctgccgaattaaaataagagcgaacacaggcgctcccgccaaggacgtaatgatcccgatcggcagttcaatcggctcaatgatggttctggaaagcagatcggctaaaacaagaaaccctgccccaagcaaggcggacaacggcagtaaatgccgatggtccgttccccacaaaagccttgtgatatgcggaatcacaaggccgacaaagccaatcgtacccgatactgccacagcgcttcccgtcaaaagagatccggctattaaaatcatcatcttcctctgctgaacgctgactccaagaagctttgctttatcttctccatatgtcatcacgttcagttcccttccgtttataatcaataaaatggttcccaaaagaaaaaacgggagaaacaaaataacatagctccagcccctcattgagacgctgccaagcagccaatgcacaatcggaagcaggttgtctcctgtcaaggcgatgataagagaaataaatgcgcctaaaaaagagttggtgatgacaccggtcaaaatgagggtggaaacagacatcgaagcatgaacgaggcggctgaagaaaaggaccgccgccatcgtggccagtgccgcggctacactcaaaaccgggagtgtaaaccctccgatgacaggaaggtgcaaacctaagaacagagtcacaacagctccgactgaagcaccggatgacacacctagcgtatagggatcagcaagcggatttttcaacaatccttgaaaagcggcccctgcaatagaaagagccgcccccacaagggcggccagcacaactctcggcagtctgatattcatcataatattagtgtacatcggatcatcagaaccgatagagccgccgaaaccttgatgccaaaagacacgaaaaacagcgggaataggaatatgcaggctgccgcaagaaattcctaagatgatgctcacggctaaaaatgagaaaccaatgatatatgcggcataacgattattccttaaacgtatccgggtaaatgctttccgcaagttcttcgaccccttcgatcagacggggaccggaacgtgtcacaagatcagggtccacatcatatacacgatgatgtttcacagcattgatttcgctccagccatcgcgtttttccacagctttcgctttcacaccgtccgttgtaacaattgcatcaggattgagttttacgatcgcctcgtctgtcatttgcacccatcctgtctgatccgcagctgcgtttttagcatggatgacatttagcatttcattcataaacgtatcttttccggttgtataaatgtcaggatcaggagaaacctcgataaatacgcttttctcctcgtcttttgaaatggttttcgctttttcttgaatatcctttagatctgatttcatgcttttcacgagctgatcggcttttttctccgccccgccagcttctccgatcatttcgattgatttgtacacctcggagaatgattgtgcatcattgacagtcagcactgtaatgcccgcgtccttcagctgtttgatggcatccgctgatgctgacatggaagactcatgggccagaacgagatctggttttagagaaatgactttttcaacgtttacattcatatctccgactttctcaacctttttgacttcctttggataggtatcgtttgtggtgacaccgaccactttgtcaccaaggccgagtgcgtatgtaatttctgtgttgctcggcattaatgaaacaatcttttttggctcttttttgatggttacatcttggtttgacgcatcatcaatggtgacagggaacacttctgttttttgttttgcctttgaatccttctgatccgcaggattgccgcagcctgccagcataacagcagccaacagaagcgcagcccatatcccggctcgttttttcataatcttttcctcctaaacgaactaaaaaagcatctctacgacggtaaagatgctgtaaacaacacaaaaaagcctattgtttacacatcatctgtcctcgcagaattcgtgctgatcaaacaggcaggtatcctggctcttggcgcttggccaattacagtggcgggaccgcaccggcttttaccggtttcccttttaagccggctgttgttcacggaccggcacctatttgacattcgtatccgtttttcggagtaattatactatatgactgacaggcttgtatatgtgtcctgaatgacttttccccatattgtgtatggaagcaaaatcctcgtaaacactaaatttgatcttgtatacttaataccatcatctatcaaaaggaatgattcttatggatttacagctaaaagaaaaactcgtcttaatcaccggctcgacgtccggtatcgggaaagccgccgcaaaaagctttctgcaagagggtgcggcagtcattgtcaacggacgcaaacaggagactgtcgatcgcaccattgaagagctttctggctatggaacagtgcacggtgctgctgccgatttgtcaaaaacagatgaagcagcggcttttatcgaaaaagtaaatgaaatcggtgatatcgatatccttgtcaacaaccttggtttcttcgaggtaaaagacttcgccgatgtgacagatgaagagtggaatcaatatttcgaagtgaacgtgatgagcgccgttcggacaagccgtcacttccttccaaaaatgcttgccaaaaacagcggccgcattttaaatattgcaagtgaagcaggcgtcaaaccgctgccaacgatgattccatactcaatgacaaaaacggcactgatcagcctttcaagaggaatggctgaaatgacaaaaggcacaaatgtgacggtcaactcagtgctcccgggacctacttggacagagggcgtggcctcctatatggaaggcgccgcacaagcagccggacaggatacagatacatttatcaaagactatttcaaggtcaatgagccaacctcacttattcagcgatacgcgacagcagaagaagtcgccaacacaatcgtattcctcgcgtctgacgccgcatccgccattaacggcacggcacagcgtgtggaaggcggcattatccgttctctgtagtataaaaaaacgcatccgtgtttcggatgcgttttttttatacgtctccagcaaatggtaccggctgatatccgcctgtttccagttgtgctgaaaacaaccctccagcgtgaggctgctcgtatctctctttttctgtcatttgttctgttgccgttgtaatgtaaagggtttttaagtctctgccgccgaacgcgcagcacgtgacatatttagccggcacgctgattgaattgatttctttttctgaaacgggtcaatgtgaacaacgcggctgccgccaaacagcgccacccacagcatgccattttggtcaattgtcatgccgtccggcaatccgtctgactgatcaaaacgatagacaggttctggattcgaaacatctccgctttgaggatcatagctgtaacgtacaatctcctgggtcggcgtgtcgatgtaatacatcaaattccgctcgcggtcccaatccaaaccgtttgaggtggagacttgatccttgattttgacaagactgccgtctagattcaaacggtacagcgacgcctgtttttgctcgccttccatgctcgtcgtccccgcccaaagccttccgtacgggtcacatttagcatcattaaatctcaggctctcatgcatgtccttcggctgtttaattttttccaagctgtcatcccgaagatgatacaggtaaaacccgtccttcatcgtcataatcagttcatcctttgaatatttcgcaagcgccgtcacaaaggatttgaatttgattgatcggttgattttttcttcagggtcaaagatgtggagctcgctccccaggatatcaacccaatataagcggccgttctcttcatcccataacgggccttcaccaatcactgcccgagtgtctgcttccaatactgcatccatgtgttacacctctttagcttcagtctatatattgttattcccggcaaagaggtgtccaaaccacttgatgtttattgttttttaaaaaggatggtaatgaccgttccaatgttcgttctgctgttcacatggatcgttccgttatgcagatggacaagctccttggcaatcgcgagcccgagacccgttccggcagttgaatcttttgtgttcgtccctctgtagtagcggttaaacaaatgggtgatcgtttcttcatccattcctttcccattgtccttcacttttaaagaaatatgattttttgtttgctccagaatgacttgaatctctgttcctttgccgttgtgcttcacggcattcccaaggaggttttctaatatgcgcctgaaccacgcttcatcaagggcaaattcaatatgctcttctttggatacaaacgagatatcatagccttcagaaaacggatttttcttaaaatcctcaatgacatttttaaaaaacgggataaggctagtgagctttctctcaataggaagagcatcatttttcaggcgatacgttaaatttaagtcttcaatcagcttagacatgtattcagatttttctctgacaacctgccccatttctttcacttcttccggcgaccagtcatactgcttcgactcgagcatcatgctgtagccgtaaatgctgctgagcggtgtttttaagtcatgtgacaaaccggcaatccattcttcccttgtcgcctggattttttctctgtttcttttatcccttctcagcgtttcagtcagctgatccattgattcaaatatctcaccgaagaagcggtacggctgtttgatttttccctttttatttttgctgacaggacggccttcccggtttctgggctcctcaagcttcccttttgacagattgaccagccatctaatcgtgtgaaaaatcggcagcccgaatcggaacatataccaaacggtcatccaaatgatatacatgaacaaaacggccatcacgagaaacatcgcttttaatacaaccttcaggaatgatttgttaaactcctgatcggttacatagactgggttcggcaccgtagcgaccatccatctgtctttattgaggatcttaacggaaatttcccgcttatagttccaaggcttagagctgtatttaagcagctccagctggttcatcgtttttctctcgctttttgtgctgttgatgctgtcgagaatctttccattgctgtctaacaggtaaatggcgccttttttccgtttaatatagtcgatggtactagacttatagtgcgctagtgagtctatcttttgttcacgcttttcaacggaagtcaggagctgttcactttttgatttccagccggacaatagaagatacgacttatcttcaatattgatggcccaataattcagtttatagttatgaagctttttggttttataaatagacaaaagctctttcttggtataggtgcccggcacgtcttttggcacgccgtaggaataatcagtgtttccttccgaatcaatgatttgcatccagccgtgctgtttatcaacagatttcttcaggaaattatccacttcccatgtcccgtcttcgtttacatcgagatatgcctcaagtgtgtcggtcgttgctttcgtcagccctgaattggattccgcatcgctaaaacgggcgtctaaatagaaaaacgatgcaacaagcataaccgtaagcagcaggatcacaatcagcatctggccgaaaaagtgaaacaaaaacttccatcttaacctcatgaccgcttgccttcaggatttgggataaaacgatagccgagacctcgaacggttacaatatactccggattgctcggatcgcgctcaatcttctccctaagcttgcgaatatgaaccatgacggtgttgttgtcaccgtaggaaggatagccccatactttttcatatatttgatctttggaaagcaccacgttagggtgttcacaaaaatactgcaaaagctgcagaagctgggctgaacaggcaacggcttccccgcctacgatcaactcggcattttgcggagaaaaagtaaagtaatcatatgtgtaggtttgatttgaactcgtttctttcgattgatatgtacgcttgagatgcgctctgatccgcgccgctaattccagcggattaaatggttttgtgatatagtcatcagctccaaccgcaaagcccgataatttgtccgcgtcggatgatcttgccgtcaggaaaaaaatcggagcgtctgaatactctctgatcaatgtgcaggcttcaaaaccggacattccgcccatcatgacatccagcacaatcaagtcaaccttattggccttcacaacgggaatcgcttcttctgcgcttgccgcatccagtatatttcgataaccttctttttcgagaacgcgtttgatcatgtccacaatcgctttctcatcgtctacgattaaaattgacgcattttccacttttatgttcctttctgtcactgtttttttcatcttatcattatatcgtttatttatggtacatttttgaatacattggagccttggcaaatcaaaacagcaaaaaaggagcaaacaagcgctcccttttgatgttttttcatatgaaaatattatgagttctcatctaccatgtacaaaataaactcccaaaaccccggtacatcctgacataaaagcatatcagccttttcaaacattttgatcttcagctcttgctctaaatcttctctttcttgataggacgtattgctgagtttttttctgatcatcggtgaaaagcatgcaatcaggtgctcaatgtcataagtctcgtctttttgtttctttttttgttcaaactggccgtccacagcttacttttccccctttttttgcgccgctaactgctttctgatattctccagcccctttttatgaatgttggagatgttttgtcgggactcccctaatgaatctgcaatctcctgcatcgtggcaccgtgaagatagactttcgtcagcacacttttttgtttgtcagtcagcttctggatcgcttggtagagctggtaatcctgtacatgctggctcaaatcatcctgcctgtctaaaaattcttcaaatgcatcgctacctgtttcggaagaaagccgatctcccgcctccggatgatcaaccgtcagtggataccgtttttggtttttgcgaacccgcttatcaaaatcaatagaaaagatgcgaatcattgaattcatatacttgacgatgcggatttctttataaaattgcttaaatagctcgtccaatgatcttgcatctttttcgttagggctttccattacgtttttgaacaaacggtaatgctgaggattgctcaaaaaatgcttcacgatgggatgcttcattatctccttacattttgaccgtaaaagactttgatagtccatcaaaccgcctccctactaaattaaatgaaggaaagcaaaaaaaagtaaactactactttccgcctagtgtcttccaaaatactttgcagcagtttacgttttatcggttttcctcacttacatacatgactgcagaaaaagaagggaggtattttcctatggatcaggtttttatagaggaagtcgtaaaacagatcggcaatttggggtttcccgcgctgattgcaatgtatctgctgacccgattcgaaaagaagtttgatcaactaatagaactaatgacagaactgaaagatcatgcaaaaaaataatttttcaatcgaagttgacttttcactggtttttttcacttaacaaaacagaagggaaaacgaaaggcctttcaccttctctttctgctatcacatttaaatgtaaggaggaaacatttcatgaaaaaacaaaatgacattccgcagccaattagaggagacaaaggagcaacggtaaaaatcccgcgcaatattgaaagagaccggcaaaaccctgatatgctcgttccgcctgaaaccgatcatggcaccgtcagcaatatgaagttttcattctctgatactcataaccgattagaaaaaggcggatatgcccgggaagtgacagtacgtgaattgccgatttcagaaaaccttgcatccgtaaatatgcggctgaagccaggcgcgattcgcgagcttcactggcataaagaagctgaatgggcttatatgatttacggaagtgcaagagtcacaattgtagatgaaaaagggcgcagctttattgacgatgtaggtgaaggagacctttggtacttcccgtcaggcctgccgcactccatccaagcgctggaggagggagctgagttcctgctcgtgtttgacgatggatcattctctgaaaacagcacgttccagctgacagattggctggcccacactccaaaagaagtcattgctgcgaacttcggcgtgacaaaagaagagatttccaatttgcctggcaaagaaaaatatatatttgaaaaccaacttcctggcagtttaaaagatgatattgtggaagggccgaatggcgaagtgccttatccatttacttaccgccttcttgaacaagagccgatcgaatctgagggaggaaaagtatacattgcagattcgacaaacttcaaagtgtctaaaaccatcgcatcagcgctcgtaacagtagaacccggcgccatgagagaactgcactggcacccgaatacccacgaatggcaatactacatctccggtaaagctagaatgaccgtttttgcatctgacggccatgccagaacgtttaattaccaagccggtgatgtcggatatgtaccatttgcaatgggtcattacgttgaaaacatcggggatgaaccgcttgtctttttagaaatcttcaaagacgaccattatgctgatgtatctttaaaccaatggcttgccatgcttcctgaaacatttgttcaagcgcaccttgacttgggcaaagactttactgatgtgctttcaaaagaaaagcacccagtagtgaaaaagaaatgcagtaaataaaagacttgcggcttgcagagagcactcgttctctgcaagccttcataaggagctgaaccagtgaaacatcaaaacccttcaaaacgcttattgcggctctccataaagtacttgctggccgcagcagcagtggtgttgacctattttgctgtcatctatatattgttttctttagcgggaacgagctaccgctcagcagctcatgtcctgctttttgccgtggtattccttgttctcggattatgctttgaaccatttgaacggctgatgatacatagctttacatttttcaagacaggaaaacgtctattcattctccttgctggcatcgtacagctgctgtttttgtggatgactgctcatacaacagaccaattgatcagcgacatctggctgtccaccacagaagaaatgattgtcgcagccgtttttttgattttagacaaatgcaactcggctcttcccagctaaaaaaagaacgcattccaattggatgcgttctttttattcatagcgaagcgcgtctacaggctgaagcttcgaagccttgatagacggaagcaagccgaagataatgccgactgccattgaaaagatgagtgctccgacaacagctggaatggagacgataaaaggcatcggaaaaatgaccgtcagcagcttggcgatgccgaagcccgccagcacaccgagtattccgccaatgcttgtcagcacgacagcctcggttaaaaattgaaataaaatcacacgccgcttagcaccgagcgctttcttaattccgatttccctcgtgcgctccgttacggaaacgagcataatgttcatgacgccgataccgcccaccaaaagtgaaatactggcgataccgccaagcagcaatgcaaatgactgattaaaggactccacttcctgcgcgatctcctgaagatccattacactgtactctgctttttccagctcagcttctgacagtccctgatttaaaagatctgcagccattacacccgcttcttggatatgctcagaagaatcagcctgcacggcaatctgcgttggcgcgtcaaatccttcaataagcggccacacttttttcggcacgtacaaaaccgggttcgcatagtcgccttcaaacatgctttcctgttgatttttttctttaaaaacacccacgaccttaaacggcacaccattcatctcaatgcttttatgcagagcttctccgtctggaaacagttcatctctgacagcttcattgatcatcactacttggtgtgtgctgtttaaatcgttttccgtcagctttctcccttcggttattcggattggaaacatgtcgaagtaatcatcgtccactccatacacttggggatacgaaacgttagttaaatgaaaaacgctcgcgccttctgacaagtaatataaggataatcctttgaccatcggatctgatttgatcgcctttactgtttcttccgctacaggcggcgcggacgcatacgacacctgagggccgccgctctcctcttctccgccagacggctggtagacaacattgatggcgttgtttcccatgccgatcatactttgctttaactgctcactttggcccttcagcattgaaacaatcgcgatgattgccgctatgccgataatgacgccaagcattgtcagaatcgatcttaatttatgagagaaaatggattgaaaggagattcgaatatgttcaagcatggctgatatcccctctctcatctaataccaactctccgtctctgataaaaacggttctgtcagcttttttggcgacgtccgggtcgtgggttatcataataatggtcttgccttcccgatgcagttcagaaaacagtgccaaaatttgttcacttgatttggtatcaagcgccccggtcggttcatcagctaaaataaacctcggctgattgacaagggccctcgctatcgccacccgctgcttttggccgccggacagcttaggcggtttgtaggagaccctgtcttttaatccgactttttccagcgcttcatatgcccgttgccttctctcttttttcttcactttattgtagatcatcggcagctcgacattttgcagcgcggtgagacgcggcagcaaatgaaaagtttgaaacacaaacccgattgattcattgcgaatttcggctaaagccccgtctttccctttcaatatatcgatctggtcaagcgtataggttcctgaggttggcctgtccaaacagccgataatattcattaacgttgactttccagaaccggaaggccccataatagctaaaaactcccccgcctgaacggtcagattgatatgtttcaagattggaacttcttcttttcccagcttgtacgacttcgaaatattattcagtgtcagcattgactgtaacctgctttccttccttgaccgcgggatcaggatagatcacataatcttccggcgtcaggccgctcttaatttccaccatgtcattttcatcagtctctccgatttcaacaggctgcttaaccgctttgtgattctcatcagctttccatacgtacggttcgccgtcatcctgaatgaccatgtcggacggcagcttgatcgtgtccgcatcagcattatcactcatcacttcgatgttgacatgatagccgacttcaagacctttatggctgtctaataaaatggtgaaaggatagttagaggactggggattcatttcttcatcagcaaagctttctgattcttcaccctcgcctgctcccgctggaagcttgccgatcgaggtgacctttcctttccactcgccctcaccgcctgttttcagcgtgaccctgactttgctgccttttttgatcgtgtccattaacagctcattgatttggcttttgaccagatatttgcctgtcgaaacaatctggatatacgggcctgctgcctggtcgcctgttgcaccgtcagcgatatcctgattgacgctttgaacgattccgtcatgcttgcttgtaatgacattggaacctttgtttttcgtcaggccagccagttctttttgatgctgcttcagttcaagctggcttgttttcaaatcgaaattggtttgatcaagttcatcttgaagctggtttttctcttcttttcctgcaactttcagctttttttccgtttccgttattgatttttgcaaacggttgatttgcagatttgtcatttcaatttgcaaattggcttgctccacttcatcagaatgatcctcgccctcatactcaaaaagcttatcgccctttttaacctgatcgccttctttgacgtatgtttttttaatgctgcctttttctgaatctatgtatactttctgctgtttctcaggttcaacctttccagaaaacgtttggcctgattctgaatctcctcccatgtataccgcgaccgattcagcatagggctccgatgatacggcaacttggttcatgtgagtaaaaaagtaaaaaccgccagcgccgatcccagccaatacaagcacaccggcacatatcgcaccgccaataagccattttttcttcttggacacaacgatctcctctttctgtaaactatgtaatattttcgaaacattctaaccaatattatctattaattcaaaaagacttgcaatccttttattgaaatgacggaatcaaatagaaaaattgtattttcaaagccgaataaaaaaaatcccggcttcaaaccgggattttttcatacagtaactagctctttttcatttttaatcaagtcatatgtcaagcatacaggtttatttgtacggggatcagtcacgatttcggcatcaatctgaaatacctgcttcaaaatgtctggtgtcatgacctccagagcagttccttccttgatgaccgtgccttttttgagcgcgatcatataatgagaaaaacgagctgcatggttaagatcatgaatgaccattaaaatcgtccgcccttgctctttgttgagtctgtcaagcagctgcagaatttcaagctgatgtgcaagatcaagatacgttgtaggttcatccagcagaagcagttccgtcccttgcgcaagcgccatggcaatccacacacgttgacgctgtccgcctgacaatgcctcaatcggccgttcagcatattcagccatgcctgtttcttcaagcgcccatttgataatccggcggtcttcgtcatttaatctgccgaatcctgattgatgcggaaacctgccgtacgacaccaattcgtgcactgttaggccgctcggcgcttcaggtgtctgtggaagaatcgccatatcttttgcaatgtcctttgtagacattttatgaatcgctttgccgtttaaatagacggcacctgcatgtgaacgcataattctggacattgtttttaaaatcgttgatttcccgcagccgttcgggccaattaaggtggtaattttccctttaggaatcgatatatttaaatcctctacaatcaccctgtcgccataaccgattccaagctgttccgttgataatgaattcatattcggccccctcctctaattcgctttcatcaataaataaataaagtaaggcgcacctagcacggaaatgacaagtccgaccggaatttctgatggtgccaatacatttctcgccagcgtatcagcaagcaaaaacaggaatgagccgatgaaggcggagaccggtatcagcgtctggtgacgtggaccggtcagccttctagccacatgcggcgcgatcaatccgagaaacgcaatgccccccgcagctgccacgcatgaagcggcaagagtgaccgctgccagaagaagaatccgtctttccttttcaacagcggtgcccagcccggtcgccaattggtctccgagctgcataatgttcaaatagcgtgccttatataaagtaaacagaagcaagatcacaatccaagggagaatcgcccagatcatattccagttcgccccccatattgagccggatatccaaaccgcggcttgcataaaatcatgagggtccatcttgagctgaaaaatcagcaacagggcgttgaatccggcattcacccctatgccgactaaaatcagccgaatcggtgtcacgccttttttccatgccagaatataaatgagaaacgcagcgaggattgctcctgccaaagcactgaacggcagcataaatgttccgaaaaagctaagatctgaagctgacccttgaaaaaagtatataaaaagcactacagcaagtgaaccgccggcgttaattccgagaataccaggctcggcaagttcattttgagacacgctttgcaaaatggctccagctacggagatccctgctccaacaagcaaagaaaggatgatccggggcagcctgaactcaaataagacaagttcatcacgcgccgttccttggccgaaaaagacctgaagcgttttaagcggtgcaattttgataacgcccaaattgagactgataaaaaagaccaccacgataagcaaaaaggtcacagccattacaatgagcggtttgtttgtttttgttttcattacagccctctcctttcacgacgtgccaaataaaagaaaaagggaacgccgataagagaagtcagcgcgccgacaggcgtttcaaagggcgcatttacgagtctggccgctatgtcagcaaaaacaagcaaaacagcaccgagcaccgccgagcaaggaatgatccaccgataatccacaccgaccaaaaaacgggtaatatgcggaatgatcagcccgataaatgcaatggtgccggcaatggaaaccgcagctccggtcagaattactacaataagcatgccaaccagtttcaccgctgatgtatattgtccaagcccttttgccagatcgtcaccgagacttaacactgtaacagaccgggcgatgaaaaacgcgagcgttaaaccgacagcccctgcaataagcaaaagctggacccccgaccatttcacacccgctaccccgcctgcgtaccaaaagctgatatcctgagcgacatcaaagcggattgcaatggcagttgaaatgccggtaaagaaataagtaactgccgtacccgccagagcaagctttacaggcgtaagtccgccccttgaaaacatgcctatgcccattaccgtcgatgcccccagccccgctcccgcaaaggaccatagcacaagccccattgcagaaagtccgggaaaaaaggcaaacgcaatcgaaaccgcaaacgcagagcctgatgtcacacccataatcgaaggctctgccaaagggtttctcgtcatcccctgcatgattgctcccgacactgccaacaatgcgcctacaagcgcggcagccgccgttctcggaagccgaagatcatgtataatttggtgagatgtctttgtcggctgataatgaaaaatggcctcccatacagtgcgcaaatgaatatccgctgcacctagggatatggataaaaatgcgccaaggcaaagcaggcatagacctgcgataaggacgatgaccgcgccatatgtccttgacgtccattggatttcttctgatgcagtccgtatatttttatgttgactcaactgccgtacttcctttctgttactgataatgattatcaattgctgtttcagtatatcacttttttcagctgatttaatagagtgttttgaacaaaaatgaaaatgcatttgcaaaaatatcgtgtcaaccggcacttgcagtggtataatcacagatgataatgattctctttttcatctatcttttagaaagaaggtatgagatatgacccatatatacaagaaactcggagccgcgttttttgccctgttattgattgcagcgctggcagcctgcgggaataactcagaaagcaaaggttctgcctctgattcaaaaggcgcagaaacctttacatacaaggctgaaaacggaaatgtaaaaatcccgaagcatcctaaacgggtggttgtcatggcagacggctattacggctacttcaaaacactcggcatcaacgttgtaggtgcgcctgagaatgtatttaaaaacccttactacaaaggaaaaaccaacggcgtcgaaaacatcggagacggcacttcggttgaaaaggtcattgatttgaaccctgacctgattatcgtctggacaacacagggcgctgatattaaaaagcttgaaaaaattgcgccgactgtcgcagtaaaatacgataagctcgacaacatcgaacagctgaaagaatttgcaaaaatgacgggaactgaagataaagctgaaaaatggctggccaagtgggataaaaaagttgcggccgctaaaacaaaaatcaaaaaagcggtcggtgacaaaaccatttccattatgcaaacgaacggaaaagacatttacgtatttggtaaagactttggaagaggcggaagcatcatttacaaagacctcggcctgcaggctacaaagctgacaaaagaaaaagccattgaccaggggccaggttatacaagtatttcattagagaagctccctgacttcgccggagattacattttcgcgggcccatggcaatcaggcggtgatgatggcggcgtttttgaaagctccatttggaagaacctgaatgccgttaaaaatggccatgtatacaagatggatccgatcggattctatttcacagacccgatttcattagaaggacaactggagtttattacggaaagcttgactaaataaacaaaagagccgcctgcccgcggctcttttgcttatttataaggaacggctcaatttgaatcatatcggatattttctttgagccattcatattaagctgcatcctcatcacgatcagtttttttatgctggagagactgaaaaacgttttttgcatatttaacgaacggattcctaacaggagaaattgtgattttataaaaaagacacctgagcaaatcaggtgtcttttcattatgcttgtttttctttctggaacttgttactcacaaatggataaacgattaagccgacaaagaataaaccgatgccgagtataaatgtcgttaaatctgctgtgcctgttacgataacaaacacggagtatgcacacgccagtatcgcgatcaatccgtctcttacacgggagcctttcagctggtcatacgtttcacctttgatgactaccttcaagctgtagattgcagataccagatacggaattaaatatgcgagtgtagccgctgtcgttaaaaatgtaaatgcgtcacttattgtccgggaaataaccgagaaaatgaagacctgtgacatgacgtttgtaataatgagtgcaatgaccggacttccctttttattcgtttttgcaaaaaatgccgggaaatctcctgctttagcggcttggtatggcacctcagagccaagcaaaatccagccgagcatcgttccgaataaacaaaggatagccaaaagcgccataatcacgcttcccgcgtttccaacaatcgcatagagtacatcaacaaatggtttttcagagccgacaagcttatcatgcggcagaacacccatcgtaattaaagtcacaataatatatatgctcaaggcaatcagcaagccggtaattgtcgcacgtttcacatcacgctgagagcgcgcacggccggacaggatcaccgcggattcaattccgacaaacgcccacagtgtagaaatcgcagcgttatgaacctggccaccaattccaatgcttgtgccgttttctccttgaaccgggaaataaaaatgaccgaataatgacgtttgaaacacaaacaaaccggcaacgataaagaagacaaaacctaatactttagaaagcgttgtgacaaagtttaatttacttgcgccgttaatgctggcaacaagaatcgcgtgcgttccccataacaagatcgtacatacggcaaacgtcagtaattggccgagtgtcacctcttgcccgccgatcgaaaacatctcacgtttatcaaccaagatcgggaagaacgaagtcaagtaaccggcgagacttgtgatgatcgccacgttactgatccagctcgccacccagtagccccacaccattgtgaaaccggcagcgttgccttttttcgggtcagaaaacagcgctcttgcataactttgcggtcccgctgtcagttcaggcttgcgaatggacaagtgtccgaacacaagtgcaatcatcagcacgccggcacctgtcaaaagccaggcggacgtagctccaaacggactcgcaattgaagcaagcgagctcggcaaggagaaaattcctgatccaaccatatttccaacgacaaacgccgttaataaccaaaaaccccatttttttgtctgttccattccagtacctccatgattctttgtacggaccagaccccgagatcatataaacgcaaaaaaagcctgaacaaaagtccatgcttaaagaaacacacacccttgatctccggatagccctccgcgaaaaagcacgcggcagtcctgcacttattcagatacagtcccagcatagagaaggatcggctttctccacacttcggcgctgatgccttttacacatgtttaacagcccctgtcagcctagcatgtgtgactcatcatccgcgcaacctctacctcactgagaaagagtgaggatttaattattcagttactcccagaaggttatcaaagaaaggatgatctgtcaaagggaacagatggaaaatacggatagagccaagccctatccgcatgtggttatcgattatttttctttttttgcacagcttcttgaagcggatcatcttttagagctgaaccagcatcttcaagagctccttggattacgtttttttctttttcggaacgttttcctttatctttattaaagaaacccattcgtatcacctcttttaaaaaataggtacatgtttaagatgcctttttcctgaaaaattatgcgggatattttttatcgtccaaagtcctgttgatcaaacatacattctcttgatatatttgtaattcagagattttttgcaaaagataaaaggagaagcggcaaatgacaggaaaaacacacatcatgggaggcatcgcttcttgtacggcagcggcttattattatggatttgatccagtgcttatggctgcgtcaggcgcggttggagcattaatacccgatatctgccacacacaaagcaaaatcgggagaaaatttcctattttatcgaaagtggtcagctccgtttttggccatcgcacctttacacacagcctgctgtttatgctcatcatgttttttatcacttctacatacattccagataaaaacatatcagccggcctgatgatcggaatggcgagccacttgattcttgacgcttggacggtgaacggaatcaaattattattcccttccacgatccgcgttcggcttccattatatatgaagacaggcagtttttctgagcagctcgtgctagccggcctgacccttgcttcatgttactacttttatatgctgtttcatggccgcatgttttaaacatgagtgctgagacttgtctgaaccggctgtttttagtaggttttacttaagaagcatttcatgcagatgatcaagaaaacgtgaggagtcatattgatgaaaggaaccttttttcacaatcagcggtttttatgtttttcgatcttatttatgtggatcaaaacgtatgtgatatataaactcggctttgatttgcaaatcgatactctgttggaggagctaatgctgctggtcaacccgctcagctttattcttcctttattcgggatcggcctgtttctaaaagaaaacaagcagcgggcctttttgctgattgccaatttggttctgactgttatcttgatctctaatacgattttttacggcttttatatcgattttattaccatcccggttttatttcaggccagcaacatgagcgatatgggcagcagtgtaaaagaactgttccatcctctgtttatcgccctgtttgtggatttggtttttctgctgttgttcgccagaaaaaccaaacacccacagacaaaagccgctccccacacgatcaaacggtactatgcagcttcctgcggaatgcttttatgcacactggcacttgcagaagtacagcagccgaagcttttggcacattcttttgaccgggaaatgctagtcaaaagcatcggcctgtttcagttccatatttacgatacaatttctcagactgttaatatcagcgcgaaagcttttgccgatgaagacagtataactgccattaaaaactacacagaggctgattacagcaagcctgatcaaagcaaattcggtcttgcaaaggggcgcaatgtcatctttgtaacacttgagtcgacccaaagctttgttctgaatgaaaaagtaaatggaaaagaaattaccccatttatgaatgatctcataaaaaaaagctattcctttgatcatttctatcagcaaacagaacaaggcaaaacatcagattcagaatttatcgtcgctaactcactgtatccctcccttagcggcgccgtctttttcacgaaaagcgaccatcaatttcatacgatgtataaatcgctgaagcagcacgattattattcagccgtctttcacgctaaccataaaacattttggaacagagatgtcatgtacgatacatttggcattgaccgcttttttgatgttgatgattttcatgtcactcccgggacatcgacaagctggggcttaaaagacaaagaatttttagagcagtccgccaaaaagctgaaaagcctaccgcagccgttctacagcagttttatcacgttaacgaatcattttccgtttgagattgatgaaaaggatcagctgatagatgaattcgattcaagcagtgatctgttaaaccgctatgtgaccacggttcgctatgaggatgaagcattgaagcattttatcaaaaaactgaaggacgaaggcttatacgaaaattcgatgatcgtatttatgggagatcattacggcatttctgaagcccataacgaggcaatggctgagtttttagggaaagacgaaatcacaccgtatgacaacgttcagctccagcgggtgccgtttatcatacatatcccgggaatcaccgatcaacagccggaaaccatccctgatgccgggggacaggtcgacgtcaggccgacgctgatgcatttgctcggcgttgagacaaaaggcgatatccaattcggcaatgatttgctgtcgggcgaccgcaccccattcgccgttctgcgaaacggcagctttattacgaacgattatgtatacacaaagaacacgtgctatagccaaaaaacaggtgaagtgctggaagatcaggatgcgtgcctcccttacaaggagaaagcaaacgaagaactgtctctctctgataaaattttaaatggtgacctgctcaggttttccgaatgaaaaaatccctctatcaagagggattttttacgtttccaatatcaccttgccagtcagcttcgtttcatagccgtttaaatgagacagattcgccttgtagtcctcagaattcaaaatctccttcacggctttgagcaactgctcattttttttcaaaacaacgatatcatattgttcgtcgatgagcgggataaaatcaacactgcccatatgtgccgcgtgctgtgccccgattcccgcgtcagcctgtccgcttgaaacttgtgaagcggcagcgtaatgatcagtcacgatatcgccatatcccactacatcagccggattcacaccaagcaagccaagctgttcatcaaggagcacccttgcgccagaacccttttccctgttgatgatccggatatcggctcttttcaagtctttccagccttgaatgtttttcggattccctttttgcacatacagtcctgctttgcggagaacgacattgatgagacaaaacggttcacctgtcaaaatccgttttacataaggcgcgttatactggcccgtttctgcatcgtacaaatggaggctgacaatgtcacacttgccttgatacatatcaatcaggctgtttaagcttcctttgtatttacggagcggcgtctcctgaatggcattctccaaatgcttgctgaggatatccatcgaaatgtcctgtccgctgatcatgacatttggtctgccgtccggctcagcctcctgcacctgtttcggcgcttcttttgcagcgatgggctgagacattctcatattcgttttatattgctttaaatcttcttcatccacacgcatctgccttccgacacggtaagcaggcagcacgccttttttaatcaagtcataaacggtcagctttgataccttcagcagacctgcaacttcttctatcgtataggaagaggtttcattcatcatcatcactctcctattttattataccttttcgccgaatgtaaaaaaacccacataaaccaaacataatcagttataattagttatatctaatgataaggggtgcaatcatgtttaagaagtattctattttcatcgcagccttaactgcttttctgcttgtagcaggctgttcttcaaaccagtcttcaacggacagcgagaaaaaagtaacgttaaccatctcagctgccgccagcgcgcaggatgcacttgaggaaatccaaaaaaattatgaaaaagatcatcaacatataaccatccaagataactatggctcatccggcgccttgcaaaaacagatttctcaaggagcaggagcagatctgttcttctcagctgctgaggataaatttaaaaagctggtggatgatggagatatcgcaaaaaaagacagcactgaattagtcggtaatgaaattgtgctggtcgtaccgaaaaacggagattcacctgtgacaagcttcagcaatctggctgaatcagaaaaaatcgctcttggcactccggaatccgtaccggcaggagcttatgggaaagaatcactgacaaagctgtctttatgggacaaagtgaaggataaaattgtgtatggaaaagacgttcgccaagttctttcttatgttgaaaccggcaatgtagacgcaggtgttgtttataaaacagatgccctagtctcgaaaaaggtcaacattgttgacgaggcaaaagcagatacacacagcccaattgtctatccgttaggaatcgtaaaagatacaaaacaccgtaaggaagcgaaggaattttacgaatacctgcaatctgatgaagcaatgaaagtatttgagaaatatggctttactgccgagtagcataagcgcttcagaatttttcacacccgttgtgctttcctttcaggtggcggcagttgccggaattgttgtcattattctcggaacacttgctggagcatggatgtcacgggcatcatttttcggaaaaacggcactcgaaacatgttttatgcttccgctcgttcttccgcctactgttgtcggttttattctgatcgtcattttcggaaagcacagcttcatcggacaagccatcgagtggattttccagcagcctgtcattttcacctggtgggccgctgtgatcgcctcggctgttgtagcctttccgcttatgtatcaatcagccaaaaccggatttgctgacattgatcccgatatacaaggtgcggcaatggtagacggcgctagcagatggaaagtgtttatccatatctccgtcccgcttgcctatccttcgttactgaccggaagcatccttagccttgcgcgggcgctcggagaatttggcgcaacactcatgtttgcaggaaacatccccggtgttacgcaaacactgccgacggcgatatatgtcgcattggattccggcaacaatacccttgcttgggcgtgggtcgtctgtattgttgtcatttcctttttgatgctgtttttcattcaacagaaaaaaacgcactaaaaaaactccccataacggggagttttttgattaaaacagaagctcatcaggatttggaccgacacgctcatctttatttaatgcgtcaattttgtccatgtcttcttgagacaattcgaaatcaaaaatatcagcgttttcgatgatacggtgttctttaatggattttggaatggttacaactccatgctgcagatcccagcgcaaaatcacttgagccacagatttattgtgtttttcagcaatctgtgtcagtacttcgttatccaaaagctgtccctgcatgagcggagaccacgcttccagctgaatgccttgccctttgcagtaatctcttaattctttttgcgtcaagcgagggtgaaattcaacttggttcaccatcggtttgatttcagcatctttcaacagctcttctaaatgatgaacttggaaattgctgacgccgatcgcgcgaattttgccgtctttgtacagcttttcaagcgcgcgccatgtatctttatatttatctttgccaggccaatggatcaaatataaatctaagtaatcaagctgcagtctttctaggcttttttcaaaggcagcaagcgttgtttcatagccttgatcttcattccacacttttgatgtgatgaagagctcttctcttgccacaccggattctttaatcccgatgccaacgccttcttcatttttgtagatcgctgctgtatcaatactgcgatagccatttttaattgccgctttcactgattcagtcgcttcattaccattttctactttaaaaacgcccagaccgaaccaaggcatttcaactccgttatgtaactttacagtatcttttaaacttgttggcacttgaacctccaccctttcactgaaatgtaagcgtctatattatctcacattcctctcagccgataccaataatacgcttaagaccctctttttgcttcttttttcacagcacaggcaaatccaaacactatttttttcctattttaacaatattgagattacaaatacattgagcagggtatgcgtgtagtgtaaccaaatgaaaacaaaggaggaaacaacttgaaacgtattcgtatcccaatgacacttgctcttggtgccgctttgacaattgcccctttgtcctttgcttccgctgaagaaaatcctgctccgaagatgtcgcagacaactactgctggaacaactgccgctgatgtaggtttaaacgtcaacctggatgtacttggaattgccaaccagatcgctgatgccatcaaatccgcacagaatagggatggctttgtgaaaaacctcatggagtcttccttctacgcgtccggccaaaaatataacgtcatggtctttaatttaagccaggaatatgaagatcatttgaacggtgtgcaattttacggctcagccgtttacgacggcattacgtatggcatttgggtatttgaagatggaacctttacaaacaaaggcgatggcggctggatcaactgggccttcagaggctggttcgaccgggatggcagcactgtcgcatttcatcgcccttaatataaaaaaagctggcgctctaacgccagctttttttctgcatttattcgccgccttcaagcatggcggcttcgacatcattaatgtattggcgaagctcatgggagatgtcccgggaaatttccctctcttcgaagagcgtttgaatttcatttctgatcgcctgcacagccttcagcttcacttccagcttctgattttcaaaatgggcacttgattttaactcatgatggctgtgctccagcctgaaaattaactgcttatagaatgtaatgacagataaaaacacttctttatgctcatccgtcttatgtttttccagatattctatcgctgcttttgccgttttcactcttgttgcccgtatcaatcccgcttcatttaaaatcgacatctccggctttttatgttcaccgaagaaaatccaatacatcagcctcttgagccttgtttttgataacccgactttaaacgggttggcatacaaaatttccaactcgttaaatcgttcttgcagcacatttgctgtttcttccgggatgtctccccgctccagcattttcatcagcgcctcttgctcagccttaaccccctgcgcacggacttttcgctcgtgcttcttaatgcgattagatgatgtatactgctgaaaacgaagatttttcattttctcattgtattcagctatcaccgcaagagaggccgttttgtttgtctcattcatgtcctctttaatcgtttgaagggctgttttgatcaacttgcgtctcgccgtcagcagcttcttatttcgttcctcgtcctcttcttctttttcagtcagaattggcagcacaacggtggcaatgacaagcgtgcataaaatgacgccggctgctaaaaagagaatcagatttctttccggaaacggcgtaccgtcctccaggaaatacggaatggaaaaagaacctgcaagcgttactgctccacgcacaccggaaatcgaaattaacagcgtcgaacgaagacccggtttatagatgttctgatctttattaaagaaccatttgccgttccagaagaacagcacccacaggaatctaaggagcattaatgtaaatgtgatgactaggatatagccgatcaccttcatgttgctgatggcagtgtcgttaaagataacagaaataacatcagggatttgcgtgccgagaataacgaagaccaggccgttcaaaataaataaaataatgttccacgtacttgaggagacgatttgcagcttgatcatcgttgattccagacgatcctgttcaaccgcatgggtaataccgccagctacaacagctaaaatgcccgaaacgccgatttcttcagctgccaaataaatcacaaacggcgtcagaatttgaatcagcatatgcatcgtgacatcctgcatgccaaggcggcgcagaaataggcgaaaacgaataatcaaaaatgaaatgacaaccccgcacagcaagcctccgagagaaataaagacaaagctgacagccgcttgtgctaatgaaaatgcaccagtcactgccgctgcaatcgcaaacttaaaggccaccagacctgatgcatcattcatcagcccctcaccttccagcaggcgaagaatcccttttggcattttcactcttcctgataatgcgctgacagcgacgacatcagtcggtgaaagaatggccgcaagtccaaaggccgctgccagcggaatagcaggaatcatccagtgaatcgtgtagccgcctacaatcacagtcgcaaatacaaggccgagtgcaagcaataaaatcggagcccttaaattccaaagctctgcccgcggtgtcctctttccatcattaaatagcagaggcgcgataaaaagaacaaaaaacaattcggtgtttaattcaaaatgaagtccctgtggaaatgaggcggcaagaatcccaagagccacttgaatcagcggcaccggaataaacggaataaaccggttcacgatattagaaatcgcaataatcgttaataatacgagcacaactaaaaatatgtccaaatgcatgacctccttcgtctgttgtgtgtcggcatgatgagccaaaaaatctgtttgtctaaaagcccttgagctagggtggccttgcatccgctatgtggtttcgcaggagttctctccacacttgtcttcttttatagtaccctttttagggtattttttctcatgatatgctcacagtgaacttttttgcagaagagcaaattatagaaaaaagagacaggaagctactccctgtctctcgtctttctttctcaatcatgaaaattcgtaccgtcagttgttgctttaataatgcccgcgcgaatgacaaagtcaccgaaatgctcgccttcctcgcgttctttcgcatagcgggaaagaaggatgcgcagctcgcttaaaatgtctgcttcaccgatgttttcacggtacattttgcttaaacggcttccgtcaaacgcagcgccaagatacatattatatttgcccggcgcctttccgataaatccgatctcaccgagtgcatgacgtgcacagccgttcgggcatcctgtcatgcgaatggtgatttcctgatcacgaaggccgttttcgtcaataatctcttcaatcttatctaacagggtcggcaaataacgttctgcttcagccattgccaatccgcaggtcggaagagcgacgcacgccatcgagctgcggcgaagcgctgaatagtgcttgccgtcagttagtccgtactgttcaattaaagcactgatttcttcttttttatcgcttgaaacgttcgcaatcattaagttctgattggctgtcagccggaactcacctgtatgaactttggcgatttcccgcaagccagtcatcagcttataatcatcgtaatccgttatacggccgccttcgacaaacagcgtgaaatgccatttatcctcgatgccttccacccagccatagcggtcgccgttatgatcgaaatgatacggcttcgcttcttccaggctccagccgagacggttttccaattcttcttttacgttttctaaaccgaggcggtcaactgtgtatttgaaccgcgcatttttacggacagaacggttgccgtaatcacgctgaatcgtaatcgttttttcagcaacgtcatacatttgctcaggccggcagaaaccgatcaccttggctaattgcggatatgtcgcagtatcgccatgcgtcattcccataccgccgccgattgccacgttaaaaccgatcagcttgccatcctcgacaatcgcaatgaatccgagatcttgtgaaaagacgtcaatatcattagacggcggaacggcaataccgattttaaacttccgcggcagatagagcggtccgtacattggctcgacttcttcctccggcgtgccggcaactctttcctcatcaagccaaatttcatgatatgctctcgtccgcggcagcagatcatcacttaattttttagaccactcgtatacctctgagtggatttcagattgataagggtttgatgcacacatgacgttacggtttacgtctccgcaggctgcgatcgtatccaaaagtgctgagtggatcgtctgaatggttttcttcatgttccatttcagaattccgtgcatttggaatgtttcacgtgtcgtcaattttaatgtgccgttcccgtatttctgggacaggtcatccatgacaagccattgttcaggcgtcgagacgccccctggcatacgcacgcgcagcatgaactgatatgcgggctcaagcttctgcttttggcgttcatttcggaggtcgcggtcatcctgcaaataactgccgtggtgtttcatcaggcggttatcatcatccggaattcccgcactgattcgatcgagcatcacttctttcagcgtgccgcgcaaataatcactttcttttttaatgcgttcaacatcacttggagagccgtccggtgcttttagaattttggtcaccatgttgaaaaactcctttcaagtcaaatcaatatacatcacgctgatagcgtttttgctgctgcatatcggcaagataagcctccgcctcttcgcggctcatattgccttctttttcgataatttcaagcaatgtgttatggacgtcatgcgccatgtgcttttcatctccgcaaatgtaaacagccgctccttcttgaagccattcaaacaattctgcgctatgttcaagcatgcggtgctgcacatatactttttcttccgtatcacgtgagaacgccacatccatttttgtcagcacaccgtctttgagccaattctgccactctgtctggtaaaggaaatccgtgacaaagtgctgatcgccaaagaacatccatgcctttccttccgctcccgtctcctcacgctcctgcataaacgaacggaaaggtgcgacgcctgtcccagggcccaccatgataatcggtgtttcagggtctttcggaagcttaaagttttgattgtgctgtacataaaccggcagtgtgtctcccggctgcagtcgttccgcgcacaaaatcgagcagacgccttttcgttcacggccgtgcgcatcgtagcggactgcgccgattgttaagtgcacttcatccggatttgcggataaactgcttgcaatcgaataaaggcgggcaggcatttttcgcaaaatcgagacaaactcctgcgcagatacactaaatgggccatagtcacggacgagatcaagcaaatcgcgcccttcaatataggcttttacattctcctcatttcccggggctaaaagctctctaagctcatcgttccctgtcagctgggctgcctgttcaagaagcggttttgtgagaacggtaatctcatagtgagaaatcagcgcttctttcagcggtcggacatcaccttgcttattaagcgtcacaatttcttccgggtcccaattcatttccttaaggagcagctcgacaagttccggatcgttttccggatagacgccgaggctgtcaccaggctcgtaagtcaggccagatccttcaagagacagctccacatggcgtgtttctttatttgatcctctgccgtttaaatttaaattttctaacacttcagcccgaaacgggtttgttctggaatacgaagactcaccggtttgtgacgcagccgccggcgcaggcgcggcgcttccgcccccagcttcatttaatcctttcaatacaccctcaagccattcggctgccggttcatcatagtcaagatcgcaatcaacgcgcggagaaatccgttttccgccgagttcttctaagcgttgatcaaattctttccctgtctggcagaaaaattcgtacgaactgtcaccaagcgccaaaacggaaaagcgcaggtcttcaagcttaggcgcccgtcttccgtgcagaaattcatgaaacgacagcgcgttatcaggcggctcgccttctccatgcgtactgacgacgattaaaagattggttaccttcttcagctgattcggcttaaaatcgctcatggatgagacggtcacttgaaaaccgctctgttcaagctgcttgccggcattttctgcaagcccctgtgcgtttcccgtctgtgaaccataaagaacggtcacttcttttgaaacggccggtgccggtgcttccgctgacacagctgccgccggcgtacccgcagcttcttgggcggaaacagattgagcggataaatatccgctcagccagattttctgggattcggtcaaggtcggcagaaggcggttaaggagctctgcctgctcctgattaaacggactgttcattacctgaagttgcaacgtatccacctcacaaagttataaactgatcgaaaattgcatctaattgaactttaccggaatactaggcttaagtaaaatatatttacatgatgataactattaagaatcctaatgataaaacggctatgcttcatgtaaatagaaaaaagagaaggactcccttctcttcattcagcaatctgatataagtgaggcggcacagcggttacaaacggactggcttcacctgtataaaataccgccagcatgtgcatcgcacgggtgcacgcagtatataaaagcctgcggtcgtgctctgtatgatagtgttcttcagatgcatcatagacaagcactgcgtcaaattcaattcccttcgctaaatacaccggaatcacgcaaacacccttttgaaatggttgattttctttatgaatcaggcgaacatctgtatattcactcatgtgggcgtgcgcctgtatgcattgatgcgcagtcttgcagatgacggctattgtttcgtgcccttttttcttgagccggccaatttcttgcgcgagcttttggcaaaggctctcatgtccttcagttttgacaacgagcggcatttccccgcttctattaaacggctcaatatccgctccatcttgaagcatcgctttggtaaactcgacaatctgccttgttgatctgtatgttctctttaaacgaacatactcagcaggctcatcctcaaagcacgcatccatacgctgatccccgtttatggtatgcgcgtagatggactgattgatatcaccgagcactgtcatgctggcagccggaaaaatgcttctcatgtaagccatctgaaacggtgaatagtcctgggcttcgtcaataaatagatgtttgattttcgtatttttctttctgccctcaatcagatcctgcatataaagaaacggtgccgcgtcctcatagagcaatttattatccgtaaatgccgaacgggtcagctcacctatcgcatccatcttctcatgttgaaattttcctccccagccagaaaacaattgcaaataaagttgtgtaacatcaagaaatgcaaggagcctgactgcctgtttgagcggtttgaaagcttttttcacaatgatggcggcaagcagctgctgctctctttgataatcgttaaacgtactctcgctgaaccgtttcctttcctgcagttttttgtacacgtccaagtagtcctctttgtcaagcagctcagcttcatgaacaacccaatcctttcgccgttcctttttctcaagcttgttaagctcactcagcagccacttcgcggtttgctccatccgattcggaatggagtgattttgatccaatgagtaaaaataggattgaatttgctcctttgtgatcagcttttgtccgcggaatataatatttttaaaaatcatcccttcagaggaaagccgtgtgacgtattcattaatgaattgctgaaaggataaacccgccttccatgtgattcctgcaagccttgttggaaaatcgcctccctttgtttcggtcaggcaatattcgagctgatcaaaggggctttcacatttgaacttgcggccaagacgatgctcgatatattcctgaaacgtcgcctgctccatattctcttctcctaactccggcaaaacagaggagacatagctgttaaataagaagttgggtgaaaacaaaacgatttgtccggcatcaatgacaccgcggtgcctgtataacaaataagcgacacgctgaagcgcagccgatgttttcccgctgccagccgctccctgcacgatcaggatcttgcttttttcattacggataatctgattttgttctttctgaatcgtagacacgatgtttttcatttgggtatcagagtgatggcttaatacctcttgcagcatttcatcgccaatcgtcatatcggtattaaacatcgccttgagagtgccgtttttgatcataaactggcgtttcagcaccatttccccttctatcgtttcaccgggcacctcgtactccgcttttcctggggaataattgtagtacaaacttgatatcggcgccctccagtcatagatcagaaagtgttcctccttctcatccaaacaggaagctaaaccgatataaattcgctctgcctgctcctcgccgttttcaataaaatcaatccggccgaaataaggcgattttttcaattgatgaattcgtttgagctgctgatccatgcgccgatgattgtgttcccgatcagacagcagctctgcctgctgcttaatgctagccatcgtttcaatcgcttcatgggcatcatcaaaattaaccttaacatcctcccaaaagctttttcttaatccgatgatatcatgcttcaacccgcccgcagacgtttccagaaaccgctcttttttttcgagctccttcagcacctcatctattctcgactgctcttccttccattccttatcctgctgattcatgaacggcacctccagaaaatagttgacaaacatagatgaaatactgtaaaatataattggatacatatattaaatatatgatgcaaactggcaaatacaatttataatagcacattcacccaataccaatcaaggtttgggttatttatattatgcagaaaaaaaccgatttcacttcgaaatcggtttttttgctattaattatctaagcgaaaagaacggtttggcagcttccaattaaacatataggaacaaacccggcaaacaacgagcacgaaaaacagaacgtataagccgaacgagttccccagccagcccaagccgacgattaaaccgccgagcgccgcccataccgcatagatttccgctttcagcacaagcggtttgcgcccggcaagaaggtcgcggatgatcccgcccccgcttcccgtcagcaccgcagccacgatcacggcactaagcggatggcccattttgacggcatacagtgcgccttggatagcaaaggcagcgaggccgatcgcatctgataaattgccccacttattccaatgcttcagcagcagcttcggaaacagaaacacaattgtaatagataaaagcgcgatttgaaagtacgctccctgctcccatagcgctgacaccggaacaccgatcagcaaattgcggatcgctcctcctccaaaagctgtgacaatccctaatatataaactcctaaaatatcatattcctcttccatcgcaacaattgcgccgctgactgcaaacgcaatgatgccaatcacactaagcagctcccaagccattctgatgactcccttttatgtttgttaaattttctgacgacctctagattttataatcgctccagcgtaaaatcaataacattttcatgagaaaaaaagataaatttagagggaatacggctattgctgatggacatgagtttgcgaaattaaaaaagcgcccggcatacgcgggcgctttttttgttattcagatttttcgcctttcagcaggcacataaaaatgataatcaggataaaagcaatcagggccaggaatggaatcgtaataaaaccaaaccagttaatatattggcccgagcacggcacgccgctgacacatggcttaatgccgctaaagccgggcactttttgctctaagtaatgcatgatcgaaatgaatgccccaataatcgccatcgggagcacatattttttcactcgtgtgtccccttgaaaggtggcgatgcctaaaatcaggacgagcggatacatgaggatacgctggtaccagcacagttcacatggaataaactttctgatttcactgaaatacaggctgcccagcatagcgataagagccacaacccaggaagcatataaaaatacgattctatttttcatattgttacttccctttcagctctttttctattgtctctttgatttcatcataatccgcaaaatttttgatcactttatcattgacgtaaatcgtcggtgttgcctgtatgttcattttttgattaaggtcagaatccttttccacttgagaagcgaatgtttccttatcaagattttccttgagcgtctcaggttttatctttgtggtgctttttgcaagatcaccaaggaggcctggggttacccattcctgttccgtatccggctgtttttcgaacagcttttcatggaaatcccagaaagagtcagggtcttccttccatacttcttcagatgcaagagccgctaaccttgaaccttttccatggaacatgacgttcacgaaagaaaatttcacatcgcccttatcaataaagtctttttgtatttttggaaagatgtcactgttaaacaccttgcaagacggacatttgtaatctccgaattctactacagttaccggtgcatcgtccttgccaagcacaggctgccctttgatagacggctgtccggacaccgcatcattgccttgttccgttttgttattaatgatgacaatggctgctagcaatacaacaaccacaaccgtaaggatgaccgcgaatttcgcagaagactgctgtttctttttcactccgacacctcatcgttttaaaattaaaaaagaagcggatcgcaattgacccacttctttattttaacaagacaagcgctgataagaaaaccccgaaaaaatgaattctctccgacaatttatttgtttttgagacgcatgacgcgcatggcgttcgccacagcaagcagtgtaacgccgacatctgagaaaaccgcttcccacatggtcgcaattccaaatgcaccaagaatgagaaagatcgctttcacacctaaagcaaagccgatgttttgccacacgattcgccgtgtccgtttcgcaatccgaatcgcttctgctatttttgacggctgatctgtcatcagcacgatgtctgcggcttctaccgcggcgtctgagccaaggcctcccatcgcaacccctatatctgcgcgtgcaagcaccggcgtatcattgatgccgtcaccgacaaaaatgagtttttcactaggcaaaagcttagcttctaatgcttcgacctgcgcgactttatcttgcggcagcagctctgcatatacctcaccaatcccaagctgttttccgacggcttctcccgtttgtttcgaatcacccgtcagcatagctgtctgtttgatcccaagcgacttcagatcagcaaccgcctgtgctgcgtcttcctttatctcatccgctatgatgattgctccggcatagcgttgatctacagcaacgtgtacgattgttccagcattttcatccgggacatcctcaatttgttctctttccatgagctttttattcccagcaaggatctcagttccatttacctttgcaaaaatgccgtgaccggagatttcttcgtatgactcaatctcatcggaggaaagcattttcccgtaagctttacgcacagattcagcaatcggatgctgtgaatgaagctcagcgtatgccgccgcttcaagtaatctatcctttgtaaaaccttccgcgggtttgatttctgtcacttcaaagctgccttttgttagtgttcccgttttatcaaacaccgcgtatttgacttgattcaaagcttctaaataattgcttccctttacaagcactccggcctttgaggccgctccgattccaccgaagaaaccgagcggaatagagacaacaagcgcacaaggacaagaaatcactaaaaagataagcgcgcggtacacccaatcggaaagcgcggcgccagaaagaacaagcggcggaacaaaggccagcaataccgcaatgatcaccacagcaggtgtataatacttggcaaacttcgtgataaagttttctgtccgggctttacggctgctcgcattctgaaccaagtctaatatttttgatactgctgattcctgatagccctttgtgacttcaatatgcagaacgccgttttgattgataaagcctgacattacatcttgtccttccgcagcttttctcggaacggactcacctgttaaagcagatgtatcaaccatcgctgacccttgcacgaccttaccgtccaggggtatgctttctcccggattaaccacaatgatgtctcctgtctgaacgtcctccgacgaaacctgttcgatgccgttctttgttttgagattggcgtaatcaggccgtatgtccattaacgcactaattgattttctggaacggctgaccgcggctccttgaaaaagctcaccgatttgataaaacagcataacggcgaccccctcagggtattgctgaatcagaaaagcgccgattgtggcaagagccattaagaaatgctcatcaaacacctgaccgcggatgatgtttttgactgcgcggattataatgtcaccgccgataatcaaataagcaccgaggaaaaggaaaaattcaatggttcccgactgaaccaaatatgccgctgcgccgagaatgacagccgccgccattctgatcagcatattgaccattcgattacgatagccatcatcagctgatttctttatatgcttttggcgaaccgttacatgcggatcaattgatttcacttttttctctactttattcgtgacccattgctcttctttcccatcggctgagacagttaaggtgcttgccgcaaaatttaccgcgcatccgttaatgccttttatgcctttgactccattttcgatttttcgggcacaattgctgcaatccaaaccgtccagaacatattcctgtttcactagtctcaccttaccttccgatttagggttccctcttcaaagcgtatcaatgagtattgtatttattttatatatatgagcatatactcatatataagttacacctattatatgttgttttccaagaaagtgtcaatgaaaaacaaaaaccggcatatagccggtttttcattttactttttgcagacgaagagcattcagaacaacggaaacggagctgaatgccattgctgctcctgctatccacggtgctaaaaatccaagtgctgcgattgggatgccgaggctgttatagccaagcgcccagaataagttttgtttaatgtttttcattgtcaatctgctcatgcggattgcgtcggcaatgctgttcagatcgccgcgaataagtgtaatgtctgctgtttccatggcaatgtccgtgccagttccaatcgccatgccgatgtcagctgtggcaagcgccggcgcatcgttaattccgtcgcctaccattgctgtctggcggccttctttttgcaagcgggcgatttccgccgccttttgttcaggaagaacttccgcaatgatattcgcaattcccgcttccttcgcgatggcttctgcggttctgcgattgtctcctgtcatcatgatgacatcaagacccaactctttcagacgggcaacagccttccgcgacgtatccttaatcgtatctgcaactgctactagccccgctgcttctccatcaatggatacaagcataactgttttcccttcggcctctagctcttccatttgggcgagaagagccccatgctcaacctgttcgctctccattaattttcttgtgccgacgagaatgctttttcctccggcttcagccaaaatgcctgcgccgacttttgcttcaaagcgggtaagtttcggtatctcaagccctttatctttcacgccagcaataatcgcttcgccaagcggatgctctgatcccgtttccgctgccgctgcaaattgaagcaaatctttttcttcaaaacggccgaatggaatggcatccgtcagacgcggcttcccgtttgtcacggttccggttttatcaagaacaattgtatcgagacgatgtgttttttctaaatgctcgccgcctttaaataaaatcccgaattcagcagcgcgtccagatccagccattatgctcgtcggagtggcaagaccgagggcgcaaggacaggcaatgacaagaaccgcaatgaacttgctgatcgcttcggcaaaatcgccaggagccgcccaaagataccaaatgagaaaagtgagaaccgcaatccccaatacaatgggtacaaaaatgcctgaaatctggtcagcgagacgctggatcggcgcttttgacccttgtgcttcctcaacaattttgatgatatgagaaagcgcagtatcctttccgacgttgacagctttaattttcagaaagccgtttgcgttaacggttgaacctgtcacgctgtcaccaggatttttgtcaacaggaagactttctcctgtaatcatcgattcgtcaaccgctgaacggccttcaaccacttctccgtcgacaggaattcgttcgccaggtttgacgtaaacaatgtcattaacaagcacttcgtcgatcgggatgatttgctcctgtccgtctcttacaacagtagctgttttcgcttgaagcttcatcagctttttaatcgcatccgaggaacggccttttgcttttgtttcaaacaacttgcctaataaaatcagcgtcagcaaaatcgcgcttgtttcataataaaggccgtctgtatgcccgtgagagccaatgctttgaaaagttagataaagactataagcgtaagcagccgtcgtaccgagggcgaccaatacatccatattggcgcttttatttctaagcgccttatacgcacccacataaaacggccagccgatcagaaactggactggtgtcgccagcgcaaactgcatccacggattgagaaatatatccggtacccaaatgaatgatgtaaatgtaaaatggctcaccatcgcccaaagcaatggaaatgacaggacagctgaaaaaatcagtctcgccgtttgcttccgttcttctttctttttagcagcagcctcactgtcctgttcacccttcaactttagcttatatccaagcttatctaccgcttctttcaaatcgctgacagacgcttcttttggattgtattcgaccgtaactgtttctaaagcgaagtttactggtgcatttgcgacgccttctattttgttaagccgtttttcaatccgattggcgcaagccgcacaggtcatgccctcaatatcgaattcagctttttctgtaacgacgtgatagcccagcttctctattttttcctgaatcgctgcagtccctgtttcagcaggatcgtagattacatttgatgtttccgttgccagattaacatttgcatccgtgacaccgggcatccgcttcaggcctttttcaattctggcagcacatgccgcacaggtcataccagagacctgcatcgcgatttccttttgttcactcaacatactcactcctttatatacacctggggggtatataaaaatgaaagaaatatcgcgcctccctaaaggcgcgataccttgaatcacttggctacgtcatagccctgatcttctatcgcatccgcaatatctttgactgatactttgtcagcatcaaacgaaacatcgactttacccgcttccagattgacatgaacggcactgacgccgtccagttctcctacgcttgtttctactgctttgacgcagtgctgacaagacattccttcaacttgcaatgttttttgttccatatcaattcctcctgtttattctttctattttcatcctaccatacccccgtagggtattacaataaaaaacgctttatgattttgtgaactttttaaatacgtccaaaagctcagaaatggcctgttccccgtctccgcttttgatggcatctgctacacaatgatgggcatgatcctcaagcaaatgaagcgccacatttttcattgccgcctgaacagctgaaatttgcacaagaatatctacacaatatctgtcgttttccaccatgttttgaatgcctctgacctggccctcaatccgcttaagccggtttgtaatctgatccttttctttcgagcttttatggtttaatgttttatgttcgttatgcttttccatgcgtacacctctgtttaatgatattaattcccattatactgattgtccaaacggttgtctaagcatgccgacgcaaaaaatgaatcagttaggttttaccatttgatcaggagggtatatacttctgttgataacgcttttaaaggggagaagaaaagtggatacgatcaaggttggaatattaggatacggattgtccggttctgtttttcacgggccgctgctggatgttctggatgaatatcaaatcagcaaaatcatgacatcacggacagaagaagtgaaacgggattttccagatgctgaggttgtacatgagcttgaagaaatcacaaatgaccctgccattgagcttgtcattgtcaccaccccgagcggccttcattacgagcatactatggcatgcatacaggccggaaaacatgttgtgatggaaaaaccaatgacagcaacggccgaagagggggaaacattaaaaagggctgccgatgaaaaaggcgtattattaagcgtatatcataaccgacgctgggataacgattttttaacgattaaaaagctgatctctgagggatcccttgaagatatcaatacatatcaagtttcctataaccgctacagacctgaagttcaagcgcggtggcgggaaaaagaaggcactgccactggtacgctgtatgatctcggctcccacatcatagaccaaaccctgcatttgtttgggatgcctaaagccgtgactgcaaacgtgatggcccagcgggaaaatgccgaaacggttgactattttcatttaaccctggattatggcaagcttcaagccattctatacggaggatcaatcgttccggcaaacggacctcgttatcaaatccatggaaaagattctagctttatcaaatatggaattgacggacaggaagacgcactcagagcgggaagaaaaccagaggatgacagctggggtgcggatgttccggagttttacggaaagcttacaaccattcgtggctccgacaaaaaaacagaaacgattccatcagtaaatggctcctaccttacttattaccgtaaaatagcggaaagcatacgagaaggtgctgcgctgccagtcactgctgaggaaggtattaatgtcatccgcatcattgaagccgcgatggaaagcagtaaagagaaacgaaccattatgctggagcactaaaacaaaagcctccccaaataaggggaggctttttcattagaatgtttttcctgcttctttcgcacgcgcaatcgcgtcttctttgatttgctgtgctttatcaggctccgcattatgtccctctacgaaaatgccatcgaatgatggtacgccgaagaagttcatcatgatgccgatgtagcggtgccccatttccatctcagccgcagggccttctgaatagtagccgccgcgcgcttggatatgaattgcttttttatcagttaacaagccgacaggaccttgttctgtgtatttgaatgattttcctgcaacagcaacagaatcgagatacgctttcatcactggcgggaatgagaagttccataaaggagtaacaaatacgtacttatcagctgatgcaaattgatcgctaagctctcccaaacggcctactttcgctttttcgctttcagaaagctcttcaaagcctgtacctgactgaagctttccccatccgctaaatacatctgcgtcaatgtgcggaatgttttctttgtacaaatcgatatgtacaacttcatcatttggattcgcttctttgtaagattcgataaatgctttacctgttgccatactgtacgaagttgcttcgtcatgtggatgagcagtgatatataatacttttgccatttttaccagccctttcgtttttaaaaatcacacatcaattattatcatacagatgcataatgattattctgtctctcttagactttattatagagacaaagaaatttactttcaagtaaaacatctcgaattaaagattatttaactttcccaaacagcttacttttcaaaagctgttctcaagccggaatacagcgcggacaattctttactgatccgaggataatgagggacatgcggcacttgaatatccgcaggcatccttttcatgataaaggattgctcagcctgttcaaaaaacgcccgcagctggttgatctcttcatcagaaaacggagcagacggacggcggtgagcttgcgccgagagcaaatagtaccctaagtgctgagcaccggaaatggcaggccagagcgcatccgcattcgcgtgaggaaactcgccaagcgccttgtcatacgcatcccgaagcctgacaagactcacccttaacttgtgttcgtcggcaatttgcccggttaacagtttctccataaactgcccttccagccggatgacattccgcacaagttctggcagccgcttggttgaaaaccgccgccacaaaagcattgttcccaacagcccgatcacgctgccgacagctacatcagtcagcctcgctatcataaaataaccggcgcccgccccgccatgcatactttctgtgataacaagcgcatttgcggttaaaaagggaacagccagcgcataattgcggacgatcagcatctcaagaagacattgcagcgctgcaatacaaaacgcaatataaacaccgcccggcttaaaaaacaggattgcgcctgccagtataacaccgatcaccgttccggccgaacgctgaatagccctgtgaagcgtaaaaacaacagtagtgccaagcatgaccgctgctgccgaaagcggaatccaataggagcgtgcaaagccgaatgcgagggcaaacatatcggcggcaaacagaacaattccgtactttaacgctctaatcaaaactggagacttccagtcaaaggcatttctcaaaaagtaaaaagaggatggcaggcggcttggttccccgtcaagctgcttatcaaaacgtcctgaagcgatatacaaaacctcattgatttcttcaaacagcttccgcctaggctcagattcattttcattaatctgaaacgtattgaaaacccgtgcattcgcaagcatatctccggtttggcgaagtgccttttcaatctgcgcggtctctctgtccggcgtttcagctgaaaaatgaataatggcaataaatatgtcgtcagctttctcaaggaggcgaaaaaatcgttcatcatgccgcgattttttccgtctgttccctttcccaagaaccgtttggcgggctgttctaagcatgagcaccgtctgatgctgtgcgttatgaaaacctggcgttccgacggctgaaagacatgcagccagctgatgatatgttttttgcagcaccgctccctccggtccatgtttgttccataaccagccgattaaagcgatacccatggcgaaaatgccgccgagaaacgtcagtcccgctctgaacagcgcttgtgaaggatcggccggcagcccggaactgactaaaaaggcaaggacaaaaaacatcggcgcagggccttgaatgccgagcgcgctaaaaataaacatcgccgctgcaccgatcagccccaaaacagccgccatcatccaaagcatcccggacaaaagcgtccctaaaccaaatgagagggcgatcccaatagaaaccaagagcagcttcaaggcgcgctttttgtacgattcaccgcccgcatataaataaacaaagcctccgatacttgcaattaatccgtaatccgtgtgacctgccaatgcaccgaccagcacaggaaaccctgaagcgaaacctgatccgatagcctttttccaaggaaatggatttgcatgaatgcgaaaggcatccttcacgataggcatgattctttgattgttcgcagcagttttgttcatttgacaaaatccttttcaatgaatgtgtagaacttttccagtttcttcgctttagtatgcccaaaaacgcggttagcttctcaattggtgcgcacgataaaaaaacagagacttataccgtctctgcttcattacatcagtttattataaaagcggcacctgtcaggactgttttgtccttctgccttccttcaagagcaggtgaataaaaaataaaggataaatcaatagatacccattaaacagccaccacacaagatcaaagtcactgctgaatgtccagaatgatagcgcctgcagacctgaacaacaggtcagcacaagagaaatcagcgccatcagcttccagtcagcacgattcacccgctgtaggtacaagctgtacaaccctgtgacagaaatcaggatatccagcggaaaaaaagaccagttccaagcgatcataaacggatggtcatgatgtttaaaagcccagctttccggtatgagcgaaaatccggctgacagccagtacaagataaaaccgatatcagtcacgagaaaaaacagcttcatatatctcatttgtactgcccgcttttatgtaccggctcagacaccgcaacatgctcgatcaggtttaaagacacaacaccggcaataatcaatccaattgaaatgactttcatgacactcacatgttcttgaaaaaacaaaaaaccaacgactgtaatcaagacaattcccatccctgaccatacagcataagcaactgatacatcaatggatttaagcgtaagcgtcagaaagaaaagactccctccataaaagaaaatcaacagcaaactgggaataagctttgtaaaaccagacgatagcttcatgctgacagttcccgcaacctcaaacaaaatcgccaagcatagaaacacccaattcatgtggcatcagcctcctcatcagctgttataccgttaaacaaaacatctacaattgattcaagtacctctcctgtcgtgaactgatgtttcagcggatattcagggtcatacacttgattgatgctccctatatacatgtgaacaaacaggtccggattgatgtttctgattctcttttgctgtttgcactcatttaataatgctaggacaatcgcccattcttccttaataaacgcgtctaatgtaagccacgcatcgtaatggtatttctttagttcatttaataatcccatgttcagcagttccatcccctgcggaaggctgatcagcatttgtttcaccttttcgagcacatttaaactttcattttcatagatgtctctttctatttgcttcatttcagctataaattgttcgacaaccgcctcaacaagctgatctttagatgaataatatgcatagagcgtccgcttgctcgttcccagcgctgccgccaaatcattcatcgtaaatgaaaatcctttctgcttgatcagccggaaggtttccgccagaattcttttatccatattaatcccccgctttcggtaccaagaaaactatttcggtaccaatattatacggcagaaatttatggaaatcaacaatatataaaaaaacctctcctattgggagaggtttaaaagacactgcggaccaaaccgccgtccgcccgaagtgccgcgccattgatcgcagaggaaagcggactgcttaaaaatgtaacgaagtgggcgatttcttccggacggatcagtctttgaataatagatgtcggccggttttctttcataaaacgtgcctcagcttcttgaacagtcaggttttcaccaggatacagcgagttcagcatggtttccacaccctctgttaaggtagagcccggcatgacggtgttgactgtgacattcgtgccggttgccagctccgccaaactgcgggaaatggacagctgcatcgtttttgtcgcactgtaatgggccatttcctgtgacggcataatcgccgcttcactggcaatgaaaatcacacgcccttcttttttctctatcatgttatgcaaatacctgcgtgtcagccttacaccgctcataatattcacttcaaaaaaacgaaaccattcatcgtcgggaatatcaaagtactccgccggttcaaaaatccctaaattgttgaccaaaatatcaacctctggatatgcctgaaacagctcattgcagccttcttctgttcccaaatcaaatgcagccggataaagaaccgcttcagcatgttgtgttttcagttcatctatcgtttgattcactttctcttcccggcgtccgttaatgatcactgccgcaccttcttcagctaacgaagaggcaatagcttttccgatccctgatgtcgaaccggtcaccagtgcggtttttccttgtaaattcagcttcattattcatccctccgtttttgattcctcttatttattgacagaaatctgattggtgaaacatctgctctgcaatcagtatgaaacagctgggattgaaatggaagtacgcactttttggtgcctgtggtttggagaaaaaataaagcagaacctcttaagaggttctgctttattgtcagtatgtatggagacggtgggagtcgaacccacgtccagaaacatcgattacttaagcgtctacgagcgtagcctgcatatttatggtttcactcatcttcttgcctgcgggcgggccttccgagagctagtctgttcatctcttcttacgttctcagacgggaacgcaagcgtagcctacttggatgtgctcttcacagacacataggcaatgtcaggaagagctcgctgcgcttattaggcagctaatgctacgttttggttaaaactgttagttttgccagttatatttaagtgcgtgtttacgagatcgcctctcggctcgcagctcaagctcgatccatccctgtcgaatccgtaacgtccccttggtataagggaaatacgggagaaaatatcaagctctcactcaaactggctatagtcttattataacatgatcacggctcttttcaattgtcaaatccttcaaatgaatggcgtcgtgatctgatcgtgaacacagtatagcacaggcctgattttcgaatcaagcactatgcctttagaagcctttttgactgtctctgaacgctctttcgatttcccgcttcgcgtccttgcgcttcagatcttcccgtttgtcatagttcttcttcccttttccaaggccgagaagcactttggcaaagccgttttttaaatacagcttcagcggaacgagagaatagcctttttcctttgttaacccgatcagcttattaatctccttgcggtgcattaacagctttcttgtccggagcggatcgtggttatagcggtttccctgctcatatgggctgacgtgcatattgtggagaaacacttctccccgttcgattttggcgaaggaatccttaaggtttacgcggccggcgcgaatcgatttgatttcggttccttgcagaacgatgcctgtttcataggtttcttctataaaataatcgtggttggctttcttattttgagataatacttttcctgacccttttggcatgccagaacctcctctctctaaggaaaaactgtccaccttttgcgatacgctctattttaccaaatgtcacgtaccgctacaatgaaaagctgtttccgaaagaaagcaaatagagcgctgcggccctatttgctggttgagctgctatttcttctttttccgtttctgtttcggagcattctggaagccgcgttttttctttttcttcttcggcttagtgaaccactcccctttttcctcagacggagctggagaaacaggtgtattggtgctttgaacacgttttctggcaggctttccgcgttttctgctccggctgctgtccaattctctcggacgccgcggagtgcctttcatgccgacaatttcaaagtcgatattgcgctcatctttattgacatcgacaaccttgactgtgatttcatccccgatgcggaagacgttgcctgtccgctcgccaatcattgcgaaatgctgttcgtcaaagcggtagtagtcatctgtcataaagctgacatggacgagtccttcaattgtattcggcagctcgacgaacattccgaagtttgtcacagagctgatcatgccgtcaaactcttcaccgattttatcaagcatgtattccgcttttttcagatcatccgtctcacgctcggcgtcaactgcacggcgctccatagatgatgtatgttcggcgatatccggcaggcgttcagcccacttttcctgtgtcgcttcatcgaccttgccgttgatcaaatacgttcggatcagacggtgaacgattaagtccgggtaacggcggatcggtgatgtgaaatgcgtatagaattccgttgacagaccgaagtgccccaagctttgcgggtcgtatttcgcctgtttcatcgaacggagcataacagtagatataaccgtttcctctggtctgtcacgcacagcgtccagaatgctttgcagcgcgcgcggatgaatattccccgccgttcctttcaccacatagccaaatgtcgtcacaaattctaaaaacttttgcagcttttcagcattcggctcttcgtgaatccggtatataaacgggacattcatccaatggaaatgctccgcaactgtttcgtttgctacaagcataaattcttcaatcagcttctcggcgacagagcgttctctgatcacaacgtctttaaccgctccttcgtcatcaacaagcacctttgcttctttgaaatcaaagtcaacggcgccgcggtccatccgcttatcgcgcagaatttgagccagacgctccatgtctttgaacatcggaacaagaggctcgtatttttgtttcagctcttcatcatcatcaacaagaattttattcacatctgaatatgtcattctttccgttgttttgatgacactttggaagatctcgtgctctgtcacctgtccctgactgttaattgtcatttcacaagaaagcgtcaggcggtcaacctttggatttaaggagcagatgccgtttgacaatctgtgcggaatcatcgggatgacacggtcaaccagatacacacttgtccctctttcaagcgcttctttgtcaatcggcgagttttcggttacgtaatggctgacatcagctatgtgaacgccaagcttgtagcttccatcatcaagcttcgtcacggtaactgcatcatccaaatccttcgcatccgcaccatcaatggtgacaatcacctggtcacggagatcacggcggtctttcagatctttttcatcaatcgtgtcaggcgtacttgatgcctgttccatcgcgtcagctggaaattctcccggcaggccgtgcttatgaatgaccgataaaatatcaatgcccgggtcgtttttgtggccgagaatggtttcaacctcaccctctgcgttcatgcggccttcaggatagctcgtcagcttgacaacaaccttatgcccttccgcagctccatttttcccatttttcggaatgaagatgtcactcgtgatttttttgtcgtccggaatgacaaagccgaagtttctcgtttctgtatacgtgccgacaacccgctgaatcgctctttctaaaatccgtatgacggttccttcctgcctggagccgcttgattgtgagttcagacgcaccatgacgatatcgccgttcattgccgtatttagctcattaggcggaataaacacatcacttaacgacgtatcctcaggcagcaaaaaggcgaatcctttcgcatgggctgaaatctttccttttattaaattcatcttctccggaatgccgtagcggtcgcttctcgtccgtacgataagccctttttcttccaaggcgactaacgctttgacgagctctttaaactcctcggcttccgtaatatttaacatctcctcaagttcctgaacggtcagaggtttgtacgcctcttccttcataaacgagagaagcttttccataaatgcttctttttccattatccgacctcctgttgattaccaatcgagcttctctaaaaattcatacacatcctgatggacgaggtcacgttctttgtcgagtgtaatgacatgccctgattcctcgtaccatttcagctgtttatcatcagtttccacttcgttgtaaataatattggcgctttcggtattaatcatgtggtcatgacgggcctgcaccacaaatgtcggtgaataaatcatatcgacattattccgcacatcagcaattaagtcttgcagcgccttgagggtattcatcggcgttttttcgaattctttcatttcctcttcaatttgctccgggcttttcccctcaaactttttgtaattgcgagcgtatgaaagaacgccttgatacatgacctcttcactcttaatatgcatcggtgcgcacattgggacaattccctttatgggtacagtgtaacccaatttcagcgaaaaaaccccgccaagcgacagtccgcaggcagcaatgctctcataaccttcagattttaaatattcatagccatccattacgtttttccaccagtcttcgggccccgtatgtacaagttcttcaggcgggacgccatgtccttcatattgaggcgcgtggcacgtatagccgcgttcattcaaatatcgtcccagcatccttacatccgctgtatttcctgtaaagccatgcagcaaaagcaccgctttgtctccgcctttaaatgtaaatggttttggtgtcacaactttcatgctcatgtctccctttctatctgcacgatcattttagttttccacagtttaatcagaaaaaaacgttttgaatatcatccagaaacgtgaaaaaggcctgacttcacatcagaccttatacaaacattgccctataggatataagcaagcgcaatcgttaacacgaaaaacaagactgccagcactaccgtaatgcggtgcaaaattaaatcaagacctcttgctttttgtttcccgaagagctgctccgctccgcctgaaatcgcaccagataatccggcacttttactggattgaagcaaaacgacaataataagtgcaatgctgacgataaccaataaggtaatcaaaactgcgtgcatcccatacacctccagactcactggctacattacttctattttacatgaaaagggttggcatgtcacgctgtatcagacgccaaaaggccggataagacgttttatcttggttaccctattcatatgaaaaggtcaaaggagaaaagcgatgccgcttatcagcatagacagcaggaaacatcttttttatgaagaatatggacagggaatccctatcatttttatccacccgccgggcatgggacgaaaggttttttattatcagcgccttctatccaagcatttcagggtgatttttccggatttaagtggccacggtgatagtgatcacatcgatcagccagcgtctatttcctattacgcaaacgagatcgcgcaattcatggacgctttgcacattgataaagctgtgttattcgggtattctgccggaggcttaatcgcgcagcatatcggcttcacccgcccggacaaagtgtcacaccttattctgtccggcgcctaccccgctgttcataacgtaatcggccagaagctgcacaaactgggaatgtatctgcttgaaaaaaaccccggtttgctcatgaaaatcctcgctggcagccacacaaaagacagacagcttcgcagcatattaacagaccatatgaaaaaagcagaccaggcccattggcatcagtattatctggattcgcttggctacaactgcattgaacagctgccccgcctagaaatgccaatgctgtttatgtatggcggcctgcgggactggacctttacaaacgcaggctattaccgaagatcgtgcagacatgccgaatttttcagattggaatatcagggacatcaattgccgacaaaacaatggaaaacgtgcaatgagctggtgacagggtttgtgctgacacatcattcataggaatagaaaacgcttggcttccttgcgttttttgttactttattgacttttgtcaacgaaatcatagtaaaaaagatcctcaaatttcaaattaaaatagtgaagcattttaccaatcacaagctgccccggccttctttctccattcagcacgcggctcagtgtggcgggtgagactccgatttccagcgcaagctgattaagggaataatcgttattaaccatatactgcaagacataatcacgtctaatctgtatcttttctactggcactttcctcaccttccattcctgaaaaacttttttctatacttttacattacggcttatgttaacttttgtcaatacatttccagtctacctattccctttagtcaataaacatactaaaatatgagtaacagtgagggacggggtgagatatatggaaagctttggcgaacaattacgggcattgcgtgaagagagaaagttaacagtcaaccagctggcgacttattcaggcgtaagcgcggccggcatctccagaatcgaaaacggaaaacggggcgttcccaaacctgccaccatcaaaaaactggcagaggccttaaaaattccttatgaggggcttatgtacaaggctggttacatcgaagaagtgcatgaagccagggccccttatgaaacgaagtgcaagctgcttgaaaaagcggaggcctatgacctgaaaaaccttgcgcttcttgagaacgaaaagtggcaatatctcaataaagaagatttgctcatgctggatcattatttttcgtttatttcagatgaagcgaaaaaacggtctgctgatgactgactcttgatagaaatgtgaggcgatagaccatgtcaccgttcggacagcaattacgggagctgcgccgcgcccgcaaactgacagtgaatcagcttgcggtgtactcaggcatcagctcggccaccatttcaaaaattgaaaacggcaaacgcgggacgccaaaacccgccacgattaaaaaactggcagccgtcctgaaagtgccgtacgaaaacctaatggccgccgcaggccatattcaggcctttcctgaagaaatccgcgaagcatctgaaggctatcaatccgtttatgaaatttaccagacggctgtcacacgcggagcggagcacctcccgattttcaatagtcaaaaatgggaacatctctcaaagcaggatattgaaaatctcagcaaatacttcgattttttgtcttcagaagcaaaaaaacgcgcctcttcctcataatcccctgtttctctttctatattttatcaatcacgcttgcatgccctccctcgttatttgcgttataatagtgacagacgaggtgaaaagtatgaaccaatcagaaatgtgtcctagatttgaaaaagcagtcgacatcttaagtaaacgctgggtcgctttaatcgtatttcagctcttgaacgggtcgcagcgatttagcgaaattgaagcagcacttccaaatctaagcggcagagttctgtcagaacggctgaaagaacttgagcttgaaggagtagtgaagcgggatgtcatccctgaaactccggttcgcatcgaatattcattgactgataaaggaaaggcactagcacccatattaggtgagatttctaaatgggcgactgaatggattgacccttcctttcttgactaattgctaaaatggttctgatctcaaagacgagaaaagaaccgttttttattttccaggtgaaaaaaagatatctcagccgatatatagtacatccacacattacgtttttaaaggagaccactatatgcgactgacgatttcccgcaaattcagcctggtatttttgacactgatcctgatcaatttacttgtaggcggaataggcgttcttaatatgcagcatatcattcaaaaaacagatgaaatcaacacaaaatggattgacggcatcaaaggaatcacttcaattaattatgtaaccgagcacctgtcttctaaagaaaaggactttctgatttatacagacaaaagtaaaatggatacacttgatcaagaaatgaatcaaatcatggaagacattaaccaaaagctcgataactacgaaaaaacgatctccactgataaagagcagaaactgttcgagcagcttcaaactaaagtgaatacctatatggatattcatgcgcaaattatcgaaagcggccgcacgaatgacatggacaaagcaagaggtttattggttcagactgaggccagctttgaggatatgaaaaaaacaatcactcagcttgttgacttaaatcaagaaggcagcaacacagcggtaaaagaaacgaaggccgtctatcataaagggctcatttacactgctttgcttgtggcagcatcaatcctcatcagcattttcatctggctttatatcacgcgaaacattgtaaagcctatcattcgcatgaaggaatctgccaatcatattgccgaaggcgatttgtcgaacgatatggaggccctcaactcaaaagacgagctgggtgatctgaatgaagcgctgcaaaaaatggtagggaatctgagagatattgtcggatattctaaagacatatcaagccgggttctttcttcttcacaggtgcttgcaaccgcaacgaatgaaacaagatccggcagcaaacatattaccgagacgatgaacgaaatggctgagggctctgaacagcaggcccaagacgcggtgacgattgccgaatcgatgaatgagtttaccgaaagcattgataaagcctataatcacggcatcacaatcagcgatacgtctcaaaacgttctcgaactcgcggtaagcgggaacgaaaatatggctacgtcattacagcaaatgaaaaccatccatcatattgttgaagaagccgtgcataaagtgagatcactggaacagcattctcaggatattaacaagctcgttcaggtcatcaacgggattgccgagcagacgaatttgctgtcccttaacgccgcgattgaagctgcccgcgctggagaaagcggcaaaggcttcgccgttgtggcagaggaggtcagaaagctggctgacggcgtttctgattccgtgcaggacattacccggattgtaaacgggacacagcaggagatccacactgtcattacgtacttggaaagcagctttacagaagtcgaaaaaggaacggaaaacctgacagacaccggacaggctatgcagcatatcaaacaatccgtcacccatgttgcagacagcattaaggaagtaacggatggcttgaagcagttaacaaaccaatcgattaccatcaatcaatcgattgaaaatatcgcttctgtatccgaagagtctgccgccggcattgaagaaacattttcaattaccgagcaatccgcccattcgatggatcaagtgcttctaaatgctgaagagcttgagcagctggccaatgagcttaatgagaagatgggtcagtttacgatttaaagagaaaaaagaggctggactccagcctctttttctattctatgcagctgattgaacatgtttcgccccggttctttttttcttcaccggacttaatgcccgctccagccaagccatgagcaaatccgcccctaccgccatcaccgcagttggtatcgctccggctagaataatcgcagttccgtttgttgcgtttgagccgcgtacgatcatgtccccaaggcctccggcaccgacaaatgtgccgatcgctgtaattccgatggcaatgacgagagccgtgcgaaggcccgccataatgacagaaagtgcgagcgggagctcaaccattctgagcacttggaatttcgtcatgcccattgcttttccagattctaagtaggcatgttcaatactgataatgcctgtgtacgtgtttcgaataatcggcagcagggaatacagaaataatgatagaatcacggtatttgcgccgagccccataacaagcattaagacggccagcatagcgagcgccgggattgtttgaataacgtttgttacggcaaacacccaggctgacaaacggcgaaaatgcgcgatgaggattccggccggaaccccgacgacagcggcaaataaaacgccgtaagccgacatgagaaagtggcggccgaattcatccatgacgtaactgccattctgcgcgtaatacgtcattaactgttcaagcacgttcattgacctcttccccctttcacgattcgaaatagcgatgtttttctaaatattccttggcaacgacagacggttctttgagattgccgtcgacttcatagttaagctcctgcatcgtggctgtgtcgatttttccgagcattttcttgatgatgccttcaagttcaggatgttctttgagcaccttttccggaacaaccggagagcagtcgtacggcgggaaaaattgtttatcatcctttagcattttgagaccataggacttgattcttccatcggttgaatacgcaagcacaatgtccatttttccgcttttcaccgcgtcgtacacaaggccgatctgcatcggatacgtgccgccgaatgtcatgccgtaggttttcgtaaaatcctgatagccgtttcctttgagcttcatccaatagttatcaacgcccagctttaattgcggcgcccattttttaacgtctgatacggtctctaaatggtattggtcggccagctccttgctgactgtaaaggcatatgtattatcaaacccgtaggagtcataccactttaaatcatatctttttttaaactcccgctgagtaagcgccagcgctttgtccggatctttttcaggttccattctcaacgtgcctgtcagcgcgtctcccgtatatcttgtggccgcaatgtcgatttccccgttcattaaagcctgctgctgcaccgcgttggagccaagatttttaatcgttgttgttttgagatcagtatggtgttcgatcaactggccaagcatgctggcgatgatttctgattcgctcatgctttgcgcgccgattttaatggtctggtctgcagcagcgctgagaccaggaagcgaacagccgctcagcgtcagcgttgccgcaagtgctaaacctatcattaatttgagatattttcttttcatgagccgcctccttatgacaattccttcaatctctgcatgccggcaggtgtcagttttcgttcagcaactgccagcacataatcaatcacaattgccaatatcgtgacaggtaccgcgcccccgatgatatattccggctgatataaattcagtccgataaaaatgtaatcacccaatccgccgcctccgataaaggaagcaagcgtggcccagccgattaagtaaatcgtcgatgttctgattcccgccatgatcactggtgcggcaagcggcagctccaccaagcggacttgttcagccggcgtcattcctattcctttaccagactcgagcagatttttgttgacgccgcgaatgccggtatacgtgttgcgaagaatcggcaatacggaatagaaaaacaaagccacaatggccggaaccttccctacaccaaggagcgggataaaaaaagcgaggatggccagactcggcagcgtctgaatgatattgacaatgccgataatggtgccggctccttttttcattctggtaagcacaaccccgagggggacggcaaccagcacacctaagatcacagcaatgagcgatatcgtaatatgctcgtatgttttataaagaagctctcccccattggtttgcaaaaattgaacaatatgatgcatgacttatcgcccctccctatgacaatgctgcgagctgcttttcttctccccagagggagtcatacacgatgtcgaccagacttgccctcgtcacaattccgatcaggcgtcggtcttcatccacaacgggaacatatttgacaccccgttttaaaattttgcggaccgtgtcgcgcagcagtgtgccgcccagtactgtgtatatatcttcatgtaaaacttcactgacgagattggcctttttccggcattgatcaatgatttcaacatcgacatagccttgcagaacgcgctcgtcattgacgaccagcaatgaatcgacccgttcctgcctcatcagctgaatggcctcagaaagcgttttatccgcggtgatcgttacaggctgtgtgttcataatctggtcaacccgttcaacatccgggctggatgactgaatcagccgctccttgccgataaattcctcaacaaattcgtctgccggatttcttaaaatgtcatcgggcgttccaacttgaacgatttctcccgcttttaaaatcacaatccggtctgccagcttaatcgcttcatccatatcgtgggtaacaaatacgatggttttatgtaaggttttttgcagttttttaaattcttcctggagggaatccctcgtaatcgggtcgagtgccccaaacggttcatccattaagataagcggcggctccgcggcaagtgcccgtaatacaccaattcgctgctgctgccccccgcttaattcatgagggtaacggtctacatattctggccccatatcgaccaattttaaaagctcacgcgcccgctctttccgctgctgctccggccatttcagcagttttgggacgagtgagatattctgctgaatggtcatatggggaaacaggccgatctgctgaatcacatagccaattttgcgcctgagctctacaggatcctggtccatgatgttttcgccgtcaatgaaaatcttcccggcggaaggctcaattaatcggttaatcattttcattgttgtcgtttttccgcagccgctcggcccgataaagcagataaattcgccttttgcaatcttaagatttacgttgttcacggcttttttgccgcccttgtatgttttcgagacattttctaatgtcagcaaacatcgcacctccaaaattaagtttattcaatttgttcagtttaaatttaatttttcagacaattgaatgcttcccattatagaataaagtttataaaataaaaagtttacaatttgttcatattatttataaagtatgtgtaaacgctgatttacccgcattgacgtgtgttgatctccttattgctccaatttcctgccaaattctcttttgacagcattttcgccgtatcaaaaatgtggtatattgacatcggaattgttagctgaaaggatgaaaccgttggagaaagatccgttaacgatcattgaacaagccgaggaccattttatagaaagaatcgcggaaaacatgcatgcatttggaatgccctctaccgtcggacgagtgctgggcattatttatatgaatcgaaaaccgatgacgcttacggaattatctgaggccaccggcatgagtaaaacacgtatgagccaggtagtgcgggaaatgcttgatgccaacattgccgagaaggtattcgaaaaaggcgtgcgaaaagatttatatgaggttgagcaggactactatcaaacatttatcacgctgttttcagccacctggagcaaagtcgtcagcaaaaacaaaatgatgcataaaaaactcaatcgggagctgcttagcgtgttggatgaagagcttactcctgaagcggaagaaaaagtgaatgagctgctgaaggaattaaaggaatggctcgattattataattggctcagccgtttgattgagttttttgagagcgaagacatttttaaatatgtgccgaagccgtaaaaagttcccaaattcaattctgggaacttttttaagtccaatccaaatggttgaatatcaaacttcaagaaaacaaacaaaataatgcataatttacattaatttattaattatccattttttgttgattattctgactagctattatataatctttttgaaatgattatattagcttagaggaggtaatctacatcaaaaaaaagggaattattactgtaatgactatatgtttcctattattttcttcttattactttagcaatatttcacctcagaatccactgttcaaaaaaaattttttgcaacaattgtctccccaaggctttggcttttatagtaaaagccctacagaagaaaacatttcatttcacacaaaagaaaatttaaagttacctaatgcacttcccaataatttttttgggataaaaagagaaggaagagttcaggcaatagaattaggcaaaattgtagagaatatcgatccaaagaattggaaaacttgtgaaaacaacaactcctgcacaaatttagagaaacaaataaagcctattaaggttataaaaaatgaagattatatacatcttagcaaaggagaatacctaatatatcgccaaaaaccactctcatggtattggatagactttaagcaaactacctcttttgaaagaaaggtgctaaaaataaaaatagtatgaagatattaaatagtttagaaggttatattgacacctataatccatggaaaaatacatatgcactttttagaagtttacttggtttctcaacattactagtactattattcaatagtactgatattttatttagttatagtgcaaataatgtcacatgtgaaaatgtctatatccctaccgctttttgttttgctaaagaatatagtatcaattttgagattataagatacttaatgatttttatattaaccttagtggttatagggtggagacctagatttaccggtttatttcactggtatatttgctatagtattcaaacttcagctttaactatcgatggtggagagcaaattgcaactgttctttcttttcttatattacctgttacattattagattcaaggcgaaatcattggaatataaagaaaaacaataatgaatctttcacaaagaagacagtattgttttatataatgacaataattaaaattcaagtttttatcatttatttaaacgcagctttagagcgattgaaaaataaagagtgggcagaaggaacagcaatttactatttcttttctgatccggtgtttggattacctgaatatcaacttaacttaatgaatccactacttgaaagcaattttattgttgtcatcacttggttagtaactatttttgagttgttcttagcagcaagcataatttcaaatatcagaataaagagaattgcccttgttttgggaatattatttcatattgggataatattcagcattggtattgtaagttttggcttgatcatgatatcagcattaattatatatctgcatcctgtacaacaaaatatcactatgaattggtgttctcctttatttaaatatatatatgtaaaaggaaagagaaatttcaaaagaataggaggtgaatcagtcaagtttcttacaaaattgtttcatagctaacatttagataatggagaaataacttaatggaggtataataatttgaaaagtaaattacttaggctattgattgtttccatggtaacgatattggttttttcattagtaggactctctaaggagtcaagtacatctgctaaagaaaaccatacattttctggagaagattactttagaggacttttatttggacaaggggaagttggtaaattaatttcaaacgatttggaccctaaactcgtaaaagaggcaaatagtacagaaggtaaaaagttagtaaatgatgtagtcaaatttataaaaaaagatcaaccacaatatatggatgaattgaaacaatcgattgacagcaaagaccctaaaaaactcattgaaaatatgaccaaagcagaccaacttatccaaaaatatgctaagaaaaatgaaaacgtaaaatactcttctaataaagttactccatcttgtgggctttatgccgtctgtgtagcagctggatatttatatgttgtgggcgttaacgcagttgcattacaaacggctgccgcagtaacaactgcagtgtggaaatacgttgccaaatattcctcttcagcttctaataattctgatttagaagcggctgctgcaaaaaccctaaaattgattcatcaataatccattataattgagtgtcttgcggattgctccgcaagacactttttcaacgtgaaccgtttaattttttgtaataatgatatgaagctagtgttgaaataactaatgctagaagaactagcacaatcataataagaattatatattctcctgtaaaaaatgaaagaacagctattataaaaccacacactacaagtactttagaggcaaagcgatttcccagtttccaaacagtctcatcttttaatgtccaaggtgtcctcaatccaataagatggttttgttctgctagctgcatagaatttccaccaataattaaaaagataccaacaccaagccctattattaaatcaatattcacttcgtatcctaaacttatcaatagagttgagagttgtaaaatatataaaaggattaacatattattagaagctaggaaaagcaatgctttatttttttgtgtagacttaatagttaacatataaaaagtaagataataaataagcataacaacaggtataataaatattgttaaaggtttagatacaattgcagccggtttatttcctgaccattgtatcggtatttcttctggaaggtattgatataatataattgaagtcaagaaactcaaacatacaataattatggaaattatatttttcttcataaatcgttatcccctttatttataaagttaagcatccaatttattgagtcttgaagtactgttgtatttagagagtaataaataaattgtcctttgcgatggtcacttatgacttccgcttgctttaaaatattcaagtggtgcgaaatactcggtttgctgatattaaaatgctcagcaatatctcccgcagtcatatcccctccttttaacaaatccaaaatttttctccttgttggatctgatatagctttgaaaacattattcatagcgttttctcctttacaaaaaaacatttagacatttagatatttgtataaatgtattattttcattataacttgaatttttttaaaaacaaccctcaaattggttataatatctgatttttgtattttttcaaatactcggataatcccaacgctggaaaatatgtttaacagatactaacacatgttgtttatttaaaaaaaccacctctgttgtatttaaatagaggtggtttttctatcagctataataaaatttccttttttctttttaatcgggcttaatgctcgttcaagccagcccatgaccaaatcggcaatcaccgccatcagagctgtggggatcgctcccgctaatataatcgcggttccgtttgtggcgtttgatcctctgacgatgatgtccccgagaccgccagcaccgacaaatgtcccgatggccgtaatgccgatcgcaatgacaagcgcggtgcgcaggccggccattatgacagaaagcgcaagcggaagctcgaccatccgcagcacttgaaattttgtcatccccattgcttttcccgattcaagataggcgtgctcaatactgataatccctgtatacgtatttctgataatcggcagaagagaatacagaaataatgacaatatcaccgtattagcgcccagccccatgacaagcatcagcacggcgagcatggcgagagccgggatggtctgaatgacattcgtgaccgcaaaaacccatccgcttaatcttctgtatctggctatcaggatgccgagcggaattccaacaatggcggcaaataaaacgccatacaccgacatcagaaaatggcggtaaaattcctgcagcacgtaaccgccgttttgcgaatagtatgtgccaagctgctgtagtacttccatatgatccacctcttttcttagtcaaaataatgatgtttctctaaaaattcctttgctacgacagacggctccttcagcttgccatccacctcataattaagttcctgcatcgtttccgtgtcgatttgcccaatcagcttattgatcacaccttcaagttccggatgctccttaagcaccttttccggaatcaccggtgaacagtcatacggcggaaagaaacgcttatcgtcttttaagattttcagatcatatgctttaatccgtccatccgttgaataagccaaaaccgcatccattttcccgtttttgactgcgtcatagactagcccgatctgcattggataagttgtgccgaactcaaagccatatgtgctgacaaagcctttatacccgtcgccttttcgtttcagccaagcattgtcgacgcctaatttatattgggaagcatttttcttcaggtcagacacggtgttaatatgctccttttccgcaaacttttttgttacggtgaaggcatatgtgttatcaaagccgtaggaatcaaaccatttataagaaaagcgcttttgaaactcgttctgcacaatgttcagcgcttttttcggatctttctccgcttccttgccgagggtgcttgttaaatctgttccggaatagcgcgtggctgaaatatcaatgtcaccgcccagcatcgcttggtgctgaacatagtttgagccgaggtttttcactaaagcagtattcaaatctgtatcatgttcaataagctgcgcgatcatattcgctacaatttctgattctgtcatgctctgcgccccgattttgatcgtatcgtcagaagcgccgcctagacccggcagagagcagccgcctagcagcatgacaaagacgagagcaaacgcgccaagccatttgatttttgtcattttcaacagtgccaactccttacgatacttccttcatcccttgcaagcctttcggcgtcacctttcgttctgtcacagccagaacataatcaataataattgccagaattgtgacaggcacggcaccgccaatgatatattcaggctggtataggttcagtccgataaaaatatagtccccgaggccgcctcccccgataaacgacgcaagtgtcgcccagccaattaggtagatcgttgatgtgcggatccccgccatgatgatgggaatcgccagcgggatttcaacgagccgaatctgctcccagccggtcatgccaattcctttccccgattccaggaggtttttatttacacctttaatgccggtatacgtattgcgcaggatcggcagtaccgaatagaaaaataaagcgacaatcgcaggcacttttcctacgccgagaagcggaataaaaaaggctaaaatcgccagactcggcagggtttgcacaatgtttacgaaaccgataaccgcacctgcgccttttttcattctggtaagagcaacgccgagcggcactgcaacgataatgcccaatacaacggctatgagtgaaatatataaatgctctcctgttttatacagcagctctccgccgttcgtttgcaaaaaagtcatcatttgattcatcttaaaagagctcctcccctggtcagatcgtcatgagctggttttcctcgtcgccccaaatggaatcgtatacgatatcaacgaggctcgctcttgtcacaatccctgctaaatggttctgttcatcgaccaccggaacatacttgatcccctgcttcaaaatttttcggactgtatcgcgaagaagcgcccctttttgaacggtatatatatctgaacggtatacatcgccaacgatgctcgcttttttgcggttttgatcaatcatttccacatcaacatagcccttcagcacgttttgccggtccacaacgagcagcgagtcaacacgtttttctctcatcagctgaatcgcctgagaaagcgttttgtccgcagataccgtcaccggcgttctgttcatcatttgctctacccgctcgatatccggtcttgactgaatcaggcgctctttcccgataaattcttcaacaaactcatttgccgggtttcgaagaatctcatcaggtgtgccgacttgaacgatttctcccgcttttaatatcacaatcctgtcagcaagcttaatcgcttcatccatatcgtgggttacaaacacaatcgttttgtttaaggttctctgcagttttttgaattcttcctgaagggaatcacgcgtaatcggatcaagcgctccgaacggttcatccattaaaatgagagggggttccgctgccagggcgcgcagcacgccgattctctgctgctgtccgccgctgagctcatgcggataacggtctaaatactctgggcccatatccacaagctttaacagctcgcgcgcccgttctttccgtttttcctcaggccatttcagcagctttggtacgagtgagatgttctgctggatggtcatatgggggaacaaaccaatctgctgtatcacatagccgatttttctcctcagctcaaccgggtcctgttccataatattttctccgtcgataaagatccttccagacgatggttctatcagtctgttgatcatcttcatcgtcgtcgtttttccgcagccgctcgggccgataaaacagataaattcaccttttgcaatatctaaatcaatgctgttcacagcttttttgccgcctttatatacttttgacacttgttccaatttcagcaatccgtgcacctccgcaggtttcctttaaattttctgaaaagtataatccttattatagtttgaactttgtaaaataaaaagtttacaatgtgttgaaattatatgttatttatagattatttattgttatgaccgagacggaaagggtgttcttacaattactccggatacctcccacttcctctgcattcagctattttcaacaccaggaagaaatatgatatattgacaccatcaattgccatttgaagggatgatcagctgtgaaaaaaaccgctctcgacatcattgaacatgctgaagagcatctcattgagaagattgccgaaaatatgcatacgtttggaatgccttcaactgtcggacgtgtgctcggaattatttatatgaatcgaaaaccaatgaccttaagcgagctctctgaggcaacgggcatgagcaaaacacggatgagccaggttgtccgggaaatgatcgatgccaatatcgccgaaaaggtgtttgaaaaaggcgtacgaaaagacctttatgacgtcgagcaggattattatcaaaccttcatttctttatttgcggcgaattggacaaaggtcgtgagcaaaaacaaagtgctgtataaaaaattaaaccgggagctgagtgatcttttacaaagggacgggcttaccccggaagcggaagagaaagtcaatcagctgctgaatgaattaaaagaatggcttcattactatgattggctgagcaggttgattgaattttttgagagtgaggaagtctttcggtatgtgccgaaaacaaaagaatgcagctctctaaaataagagagctgctttttgcatcatgaagttaagaccggaaacatgcctttcagcccggcaccaatcatcccgaccgcaaccacggctaagattaatcccatcagtctggtaatcacattcatctcggtttttccgagtttgctgctgataaaagcagaatagtggaaaaagagaaaggtcagggcaataacggcggctatgccgatcatgacagccgcataatgaccaatgccgctatgtccggcggaaaggctcatcactgttgcaatcgttccgggcccagcaatgatcggaatggataaaggtgtgactgatatatccgctttttccttgctttccttatgttcatcatggtgaagagattgcacgtgcgattctttcgcattcaatagattataggcaatgccgaaaatgaatatgccgcccgccactcggagcgcgtgaatgttgatatcaaacagtttaaagataagatgaccgaaaaccaaaaaagctgcgagaataaaaaaggataaaatagctgccttccgggcaatcgcttttctttccgctgcagtatagccttctgtcagcgtcagaaatatcggtacgtttccgatcggattcgatactgcgaataaagaaatgaagacgtgaacgataaatgagaacatcatatacctccttgttgatagtctctgcacaggaaatagaatgattctccacccttttacccggaggcgatttcccggtaaacctttatagcctgtcagaaacgcgccatgctacaatgaagtgacaaattgaataggaaggacgtatacagatgttcaaaaaaattgcggcagatgccttgggcttatctgatatcggaaaaattatcgaacctcaggactatgacaaaacagacgcagatgactatgtcatgcatgaagataatgagaaaatttatttcttgattaaaacaaaagcagacgagtattgctttacgaacctggccctgatccatgtggacggcgaacgcgccacttcctcaaaacgaacgttgaaacgctatccttattcgcaatataaaatctctgacgtttttcttgaaactgccggaaaagtggatttggatgttgaaattaagttcaagctgggcggtgaacaattcgacattgatgtccacaaagaccagattgaaaagttaaaagacctttataaagcactgcttcgcatcgctgaaacaacctatgaaaatgacattttaatcaatcaagcggagcaaagcttagataaagcagtgacgattcttcaccatacccgccctgagcacgtcaatattgaaacgcaatacaaagagctgaccgaattcggattcacttggctgacatccgttcgctcgcagtatcatattaaggattttggggatgtatttgagaaatatattaataactagataaaaaaagacacagctgctatcgtgctcgtgtctttttttgtatgaatattgattactttacaacttttttcttttataataaaactattagtctattttccctatattacagataaaggagttattttatgtattgtcctcaatgcggccatcaaacagatggcggaaatttttgtgagaaatgcggatcaccgctccccggtcaatcaggccaccagcatgcagctcaaactggagccgctgcaaagcaagcagcaaaacagttcggttcatttgtcttatccgtcctgaaacgcccttatcaggaatgtaaagcaacaggcggagaacagctgatcagcgcaatcattacgatggttcttttcagtttgctgacccctttgatgttttatattcttttttcagacggtcccggaagcgtaagctttacagcaatcttcttagagccaaccatttattttattttatttctatttggcctgcatgcatgcatctttttcgccctgaaaatcgcgggaaaccaagtgtctttcaaggattcattctcaagattcggagcatttcttattccttttacggctattttgattcttgcccttttcttctttttattacatacagacatttgctttaccatattagccgttggtttaatcggtgcattcttcgccattcctcctgcgatgctgagcagttaccagcattcatataaagggaaggttgatttcatttactcaacgattgtgatttatctgatcatctgcgttacatttcagcttattatcgaacactatgtcaaagaaattttccgttatatgctcttttaaaaacaaccccatcacctgctggtgatggggttgttttattgaatagacgttaagtaaattcttccgttcttcactacgccggtgtaggtccagttatatgttctgagctttggactgccgcctgattttgtgatatagaattcttcatacgtcttaatcgtgatagccgacccattttggctccagcttttcacttcatagttattaaagtcttctgttgtcccctctttatttaatttcgacacgagatgctgctggtcggaataaagggaactgcctttttcaaggctgtcttccatcagtgagaaattattttgattcacggcatctgcctgactttgcagataactgcccataaataatgtcacttgttcatctgtaacatcgccgcttgcagagctttcactgcctttgtttttcgagccagcccaggcggaagtgtatgtctctggtttatcatttttgattttctttatatttgtgcctgcagattcgaatgttgattctgcatcttcgaaaatccactttttctgttttttatcatatgaaagaagatattcataactcggactgtcgtcagtcatttcagactttgtatagtcgttatacgaagaagactggtgaagttcttttcctgttaccgatacctgccacgttccgtcgtttttctgagagagggcaaatgtgtccaggtcaaaatcagtttccaagtatctatcttttaagtatgaatccgcgcttttcatagaatcgacggtgtccttcgtctccgccttccaattggcacttgcctctgtcatctgggctgtattcccatcagatagagctttggagtattgttttgttgttttgacaattgtgttcataatctgttcctgtgtatcttgatcaggaattaacgttaactccatttctttatcatcgatcggaacgccggcagtttttgtttttccccacggaaattctgcctcgactgaagctgtcattgatccatctgtcagcagcggaccatatgttacggatttgaacggatctttatgaattgatttaccgttaatcagcaaatctcccttcccgctcttgatgtcattcgctaagctgaatgtcacatcgtctgcttccaatgagagatcaacacgaaagctgctatcgccaatcgcctgaatgtcttcctttttcacaaggtcaacgacatcgtttttcagtttggctgagactgtatattcgccgggaatgtacggaccaagggtttgtgcttgatctgctttctttacagatccggcttcctctttattgacatatagatcggtatttttataattgctgctcacttcaaaataaacaggtgctacctttaagtcataatggtcaaataccagcaggcttttcccgtctttttccgcatatacgatatccttctgggctgtttcatcacgcagcgatgcaaaaagttcatcttttttgtctggatgatccttcaaatatgtaagaaacggttttacattatttttagtgagtttaagattgtcatttaccggtgtaagcagagtcgcgatttggtcctgatccccatcatttacggcctgttcaaacttgtctactaacctatcctttgaagtaaaatacgctccggttttatatgcggcgaataatataacgcacgccgcggcaatgctgctccataaaatgatggttttcttagggatcggttttcgcggagcctgcctcgtttctgcagtgctagctgtttcttgatttgcctgtttgctgccccctccgatcggggtgccgcattgtttacaaaacttggctccttcattattctgggagccgcaattcttacaaaataacatgactttcctcctattctactaatttgataacatttactgcttttcatattttataataaaacagaatgaaattgggaacgaatgaaaaaattaaatgtctatcagactaaaaaggtggaatgaatatgcaaaagctcaggattgaattaggagaagaaacaaatgacgaattatatgatctattgctgctcgccgatccatcgaaagacattgtagatgaatatcttgagaggggagaatgttacacagcttgggccggtgatgagcttgcaggggtttatgtattgctaaaaacaaggccgcaaacagttgaaattgtaaatattgcggtaaaagaatctcttcagaagaaaggctttggcaaacagcttgtacttgacgccatcgaaaaagcgaagaagctgggggcggacacgattgaaatcggaacggggaattcgagcattcatcagctttccctctatcaaaaatgcggattccgcattcaggcgatcgaccacgatttctttctcagacattatgatgaggacatttttgaaaacgggattcaatgccgcgatatggtaaggctttatttggatctctgaaagcataaaaaagccgccgagagaaaatcccggcggtctttttattacttgtttaagttgtagaaagagttgataccgtggtattgagcagtttcagccaactgatcttcgatgcgaagaagctggttgtatttcgcaacacggtccgtacgagacggagcacctgttttgatttgtcctgcgtttgttgccacagcgatgtcagcgattgtgctgtcttcagtttcaccagaacggtgagagataacagctgtgtagcctgcgcgtttcgccatttcgatcgcatcgaatgtttcagtcaatgtaccgatttggtttactttgatcaggatagagttgcctacgccgtttttaataccttcagaaagttttttcgtgtttgtaacgaagaggtcgtcaccaacaagctgaacttttttgccaagacgctcagtaagaagcttgtggccttcccagtcgttttcgtcaagtccgtcttcgatcgagatgattgggtatttagaaacaagctcttcataccagtcaaccatttcagcagatgttttcacaacgccttcgccagacagatggtatttgccgtcttctttgttgtagaactcagaagatgcagcatccatagcaagtttaacttcttcgccaggtttgaagccggctttttcgattgcttcaacgattgtttgaagcgcttcttcgttagaaccaaggtttggagcgaatccgccttcgtcacctacagcagtgtttaagccttttgcgcttaatactgatttcaggctgtggaagatttgagcgcccatgcgaagtgcttcacggaagttaggagcacctacaggcatgatcatgaattcttgaatatccacgttgttatcagcatgctctccgccgtttacgatgttcatcatcggtacaggaagcgtttttgagttgaatcctccaaggtattggtaaagaggaatctgtaagaaatcagcagcagcacgcgcacaagccatagatacgccaaggattgcgttcgcaccaagtttgcctttgttttcagtaccgtcaagctcgattaaaagctgatcgattgcgttttgttcagttacatcaaagccaagaagctctggagcaatgatttcgtttacgttgttaacagctgttaacacgccttttccaaggtaacggtctttgtcgccgtcacgaagctcaaccgcttcgtattcacctgtagaagctccgcttggcactaatgcgcggccgaaagctcctgtttctgtatatacttcaacttcaactgttgggttgccgcgggagtctaatacttcgcgtgcataaacatcaacaatgtatggcatgagttttgtctctccttttgattttcaaattatttttgaattaaagatgttcctgtcatttctttcggtttttcaacaccaagaaggtctaataacgttggtgcaaggtcgcctaggattccgccttcacgcagcgtaatgccttctttcgttacaatcacagggactgggtttgttgtatgcgcagtgtgcggttcgcctgattctgtaatcagaatgtcagcattaccgtgatcagcggtaatgatagcgtgtccgcctttagcaaggatcgcgtcaacgacttcgcccaagcattcgtccactgcttcaattgctttaattgttggttcaaccattccggagtggccgaccatatcagggtttgcgaagttaagaatgatcgcgtcatgcttgtcagcttcaatttctttgacaagcgcgtctttcacttcatacgcactcatctcaggcttcaagtcatacgttgcaactttaggcgagttgatgagaatacgctcttcacccgggaattcagcttcacggccgccgctcataaagaacgtgacgtgcggatacttttcagtttctgcaattcgaagctgttttaacccgtgctgagataatacttctccgactgtgttatcaagatttatcggtttaaacgctacatagccgtcaactgtttcactgaagtgagtcaggcagacgaaatacaggttctttggataattctcgccgcggtcgaagtcacggaagtctttgtttgtgaacgtgttggaaatctggatggcgcggtccggtctgaaattatagaaaatcacagaatcgccgtcttggattttcgcaacaggctcaccgttttcttttgtgatgacagatggaatcacgaattcatcgtagataccatttgcatatgaatcatcaacaacatccagggcgctgcggtaagatgggccttcgccgtacgccattgcgcggtacgctttttctacacggtcccagcgtttgtcgcggtccatagagtagtaacgtccggaaatgctggcgatttcacctacaccgatttccttgatttgatcgttcaactggttgatgtacgttttcgctgtctgcggacctacatcacggccgtcaaggaagccatggatataaacctttgtcagcccttcttttttcgcaagctttaacagtgcgaataaatgattgatatggctgtgcacgcctccgtcagataaaagaccgaacaggtgcaaggctttgttgttttctttcgcgttgctgatcgcgtcaaggaatgtttgattgcgttcgaactctccttcacgaatggcaacatttacgcgtgttaagctttggtacacaatacgtcccgcaccgatatttaagtgacctacttcggagttccccatttgcccttcaggaagacctacagcctcgcctgaagcagtcaaagtttgatgaggatactggttccaatagcggtcaaaattcggttttttcgctaaagcgactgcgttccctactgtttcgttacgtaatccgaacccatcaagaatgatgagtgcagctggttttttactcatattgaccttcctccaataattgaacgaatgactgtggctcaaggctcgcgccgccgaccaaagcaccgtcaatatcggactctgccatatattctttaatgtttgcaggctttacgcttccgccatattggatgcgaagcttgtctgcagcttcttggctgaagctttcagcgacggttttacggatatgcgcacacacgtcattcgcatctttcgctgtagaagatttgcctgttccgattgcccagattggctcatacgcaataacagaagcagcaacttgttcttcagaaagaccagcaaggccttttttcacttggtcagcaacaagatcatttgttttgccggcttcacgctcttcaagcgtttcacctacacagatgatcggcacaatgccgtgtttgaaagctgcgtgtgcttttttgttaactgtttcatcagtttcagcgaacatttcacggcgctcagagtggccgatgacgcagtagtcaacgccaaggtctttcagagcaaccgggctgatttcgcctgtgaacgcgccgctttcttcgaagtgcatgttttgagcgccgacttttaggtcagtgcctttcacagcagaagcaagcttttctaagaaaagcgctggcgcgcaaacaacagcttcagctttgtctgctgctggaatggaagatttcacttcttcaacgaagctgacagcttcgccgagtgttttgttcattttccagttaccggcgataattggttttctcatctgttccacttccttatagcagttttgagattatttatcgttcagtgcagctacccctggaagctctttgccttccataaactcaagggatgcgccgccgcctgttgagatgtggctcattttgtcagcaaggccgaatttttcaaccgctgccgcagagtctcctccgccgatgacagagtatgtatctttcgcctctgccaatgcttccgcaaccgcttttgttccttgagcgaacaagtcgatttcgaatacgcccattggtccgttccacacgacaagtttgctgtttttgatgacgtcagcatacgtttcgcgtgttttcgtaccaatgtcgattgcttctaaatcactagggatttcagagatcggcacaattttcacgtttgcatcgttagagaaatcatctgcaacgagtacatcttcaggcatgtagaagttaacgcctttttctttagcgcggtccataaatgatttcgcaagctcgattttatcctcttcaagaagagatttcccgacttcatagccaagcgcttttacgaaagtataagcaagacctccgccgatgatcaggttgtctactttatcaagaagactttcgattacaccgattttgtcttttactttcgctccgccgatgatcgctgtgaacgggcggtcaggattggaaaccgcttttccaagtacatcaagctctttttccattaagaaacctgcaactgctggcagatgctcggcaattccagctgtagatgcgtgagcacggtgggcagcaccgaatgcgtcatttacatatacatctgcaagctcagcaaatgcttttgcaagctcaggatcatttttctcttcaccaggatagaaacgtacgttttccaatacaagaacgtctccgtccttcatctcagaaatttgtgcttttacagcatcgccgtatgcttcatccgcttttttcacttctttgccaagcagttcgccgagacgtgcagcgacaggagttaaacgaagctcctcaaccacttcgcctttcgggcggcctaagtggctcgcaagaaggacttttgcgccttggtctgcaaggtgtttgattgttggaagcgcagcacggatacgtgtatcgtctgttacttccccgtctttcattggaacgttaaagtcaacgcggcagaatacaactttgccttttacgtcgatgtctttgagagtttttttattcatgcctaggagatcctccttcaaaatggtttgcatacagcacgaaaaacgtgaaaccgtctgttcaagcgataactccgctagggcagatcgcagtctttttcggcacagggcagttcgtctaaaagccagggcagcggccttaggcgaaagcgccggcaaagctgcttaaaacgcggtcgtttctctatcacagagcgttttctgaaagccggtcttcatggaaaaagggaaagggagtccgtccccttcccttgtccgctttcattatagcgcttctattcgaaagaaccaagtcaggtcctttttcagctataaattaaagacctttttttgcgatgtaagctgcaaggtcaacaacgcggttagagtagccgctttcgttatcgtaccaagagattacttttaccatgctgccttccataaccattgtagaaagagcatcgattgtagaagagtttttgtttccgttgtagtcgccagaaactaatggctcttcgctgtagccaaggattcctttaaggtcgccttcagccgcttctttaagagctgcgtttacttcttcagctgttacttcttggttcagttcagcaaccaagtcaactagagaaacgtttggagttggaacacgcattgctccaccgttcagtttgccttttagttcaggaagaactagagaaactgctttagcagcaccagttgatgttgggatgatgttttcagctgctgcacgcgcacgacggtagtctttgtgcggaagatcaaggatttgctgatcgtttgtgtaagagtgaacagttgtcatcataccgcgtttgatgccgaatttatcgttaagtacttttgcaaacggcgcaaggcagtttgttgtgcaagatgcgttagagataacatcgtggttagccgcatcgtatttatcttcgttaacacccataacgattgtgatatcttcttcgttagcaggagcagagatgattacttttttcgcgccagcttctaagtgtttcgcagcgtctgcgcgttttgtgaagaaaccagtagattcaactacgatttcaacgccttgtttgccccagctaagtttagcaggatcgcgttctgcagaaacttcaattgttttgccgttaacaacaaggttgttaccgtcaactgaaacttcagcgtctaattttccgtgtacagaatcatattgtaaaaggtgagccagcatgttagcatctgttaaatcgttaaccgctactacctcaacttcaggattgtttaatgctgcgcggaatacgttacgtccaatacgaccaaaaccgttaataccgacttttactgccatgattgtttcctcctttaaataagtgagagatatttatattgagggattattcatcccttaataacttctttgcggctccttcgtctgtgacgagaaccgtgttgcgtggctttttaaagtaagcctcgatcgcttcggcttttgatgatccgcccgctaccgcaataatatcggggatggcgtctatgtcatccagctgcattccgacagaatgcactttgtgaaccacttcgccgtccgcgttaaaatagtagccgaacgcttccgtcaccgcgtcgttatcatctattttctttaaatcttctaaaggcgtgtttctgcgctgagccatagttttagcttcgccgattccgtgaaccagcatactcgctgatttaatggtgttcagcacctctttgacagaaggctcttcaataatagatgaataggcgccttgtgacagctgtcccggaacaaacaaaagccggtaagtgcctgaagccttctccgccatatgcgcgcatatggtgttcgcctggtttttcacgtcttcgcctaaaccgcctcttgcaggcacaaacaaaagctcgcggtttttagaatccggcgtcatcatttcggcgacagcttcaattgtcgtaccgccagttacagcgacgatatttttgcctgaaaatctttttttcatacatgcgacagccgctcttcccatttcttttttgacccatggggattgatcgctgtctccggatacgataatggcatcctttagatttaaacgttcttttaatgtcttttccaaaagagtcaaacctaaaacatctttcatcgtatcttccaaaacagaaagcagttcatagccctcttctgtcaatgtcatgccgtttgtcttaatatcgaccaggttctgttcctttaaaaactgaacctcgcccctcagcacacgctcgctgattccgagactggcagacaggcttcttcgcccgatgggttctgtcagcctgatatactgcaagatttcaaacctcttttgcataacgagcagaagatcaggcaataattttttttgagcttgtattaactggttcatgactcaaacgttccttccttttttgctggacattatatgtcccgctatgacaaaaaacgtcccgtcatagccaaaaaaaatcatttctgctttctttaattattttaacagggtggaattgtttattcaactgttaagagccaattcatcgacaatattcgcagagttttcatgccgcgtcgttttatccagcaatattttatcctatatatctttatcttatacagaaagcgccaaatggtgcatcccaatataaacagcccttcccgtagaaagggctgtttcattaaagcgttttcattttatccaaagcttttcaatttcctcgagcgatttgttcttcgtttctggacagatcgtaacgacaaacaggaaacaaaggatgttaatcaccgcaaagatccaaaatgtataggcgagcccgaaagaatcgatcatcattggcacaaactgtccgatcgcccagtttgctccccataaaaagatggtcgcaatgcccgcggcccgcgcacgcagatggttcgggaagatttcagaaatcataatccatgtgatcggtccgaccgagacacagaaagcagcgacaaaacctaatataaggacgatcatcatgatcccgcttgttaactcaaaataaaacgacgtcccgattaaaatcataaaaatagccataaaagcagaaccgatggacatcagtttttttcgtccgactttatcaatcagcaacaccgcaataacggtaaaaataacttctacaaccccgacgatacaagtcgtcacaaatccggcgttttgcccgaatcccatcattttaaagatttccggcccgtagtaagtaatcgcgttcatgccgatgacttggttaaacagcgccagcaggattccaatgacaagcgcctttctgagacccggcttaaacagctgggagagcgaccccatttgttctatttttaaagagttctcaatgttctttaattcttcttttgcaacagtttctccattaatacgtgtcaggatctttaaagcttcatttgttttgcccgctttcgccagccatctcggactttccgggacgacgagcaggacaaggaaaaaaatgacggatggcaccattccataagcaagcatccatctccagccggtgtgcacgccccattcgtatgttccggaccgctgcacagctagattaataaagtatgttgcggaaatacccagtatcgtaaagagctgatataacgaagataaacttccgcgtatagcgggcggtgccgcttctgtaatatacgtaacagagagcgatgagcccatcccgattcccagccccccgataatccttgcaatgattaaggtggacacgtcttgagaaagcgctgaaacgattgctgatatcgcaaataacaaagcggctgtcattaaaatttttctccggccgaatctgtcacttaaaaatccggatatcccgacgcccacaactcctccaatcataatgcttgaaatgacaagtccctccataaacggactcaggctgtataaatctttcagaaaaccgatggcgccagaaatcactgccgtgtcatagccatacaataagccgccaagccccgccgcacatgagatcaaaatgacaaatcccattgaatggcttcttgttacaggaacatttggttctaattgagttggagtattcttcatttccctgccctcccgaatgttgagtaaagcgttttcatttaaaccttcaattgtacgtacttatattaaaatttaacgaaaattacatttaattagtacgtacaaatatagaataatcttgtttgcattttctgtcaatgttttcttacaaagaacgctgtgatatactgaaatttgtccgtatacattttggaggaatggatatgttaccaaaatacgcgcaagtaaaagaagaaatcagttcttggattaatcaaggcaaaatactgcccgatcaaaaaatccctaccgaaaacgaattaatgcagcaattcggcgtcagccggcataccatccgcaaagcgatcggagacctcgtatcacaaggtctgctgtacagcgtgcaaggcggaggcacctttgtcgcttcacgctctgctaagtcagcgctgcattccaataaaacgatcggtgttttgacaacttacatatcagactatattttcccgagcatcatcagaggaatcgagtcctatttaagcgagcaggggtattctatgcttttgacaagcacaaacaacaacccggacaatgaaagaagaggcttagaaaacctgctgtcccagcatattgacggactcatcgtagaaccgacaaaaagcgcccttcaaaccccaaacatcggctattatctgaacttggagaaaaacggcattccttttgcgatgattaacgcgtcatatgccgagcttgccgcgccaagttttaccttggatgatgtgaaaggcgggatgatggcggcggagcatttgctttctctcggccacacgcatatgatgggtatttttaaagctgatgacacacaaggcgtgaaacggatgaacggatttatacaggcgcaccgggagcgtgagttgtttccttctccggatatgatcgtgacatttacaacggaagaaaaagaatcaaaacttctggagaaagtaaaagccacactggagaaaaacagcaagcacatgccgacagccattctttgttataacgatgaaattgcgctgaaggtgattgatatgctgagggagatggatcttaaagtgccggaggatatgtctattgtcgggtacgatgattcacatttcgcccaaatctcagaagtgaaactaacctctgtcaaacatccgaaatcagtgcttggaaaagcagccgccaaatatgtcattgactgcttagagcataaaaagccgaagcaagaggatgtcatatttgagcctgagttgatcattcgccagtccgcacgaaaactgaatgaataaaaaaagcaatgtatgggtctccccgctacattgctttttttatagctgttatctgtttttccaaacgtcagcgatgatttcaaacgaacgcattctgtctgcgtgttcaaaggtttctgagttaaccataatttcgtcagcctgtgtcgttttgacgaaatcttcaagcttcgccttcacttcttccggacctccgacaatcgtggagctcagctgctcattgaccatcgctttttcatacgggctccagatttggtccatatcctcaacaggcggtttaagctggttaggcgtaccgcggacaagatcaagaaacctttgataatgggaagtcgcaaggtgctgcgctttctcgtttgtatctgccgcgataatggtgacaccgaccatcgcatacggttcgtcgagcacgtctgacggcgtgaaggaattgcggtacagctccaaagcgggaaccgtattcgccggtgagaaatgggccgcgaacgcaaacggaagaccaagttcgccagccagacgggcgctgaagccgcttgagcccagcagccaaatcggcacatctatgccctctccgggaatggcgcgaacttgattgcgcacatttcctgacggtttaaaataattgcgcagttcctctaattgttctggaaaatcctccccgctgttgatgtttctgcggagcgctctggctgtcaattggtctgttcccggcgcacgtccaagccccagatcaatccgcccgggatacagtgtttccagtgtgccgaattgttcagcaatgactaatgaagagtggttggggagcataatgccgccggaaccgacgcggattttcttcgtgcctccggcaatatggccaatcaaaactgcggtggcagagcttgcaacaccttctatattatgatgttcagcaagccagtaacggtgatagccccattcctctgcccggcgcgccaagtccatgctgtttcggaatgattctgcaatcgttcctccctgaacaaccggagataaattcaagacagaaagcaaggtatctttgcgttggttgttagacatattgttctcctttgcaaatgtgttatcagtaaacagcccaaagctgtcaggtcatgattgaaagaacttctatcacaccataacacaactgcattcaggaataaaagaatttgattcgatgaaattcgaacaatataaaacgaacgggttggaacattattctgctccaaacaactccttagccatctcaataaagagcttagccgccagagaagcctcctttagcgacggaacagcaagctgcacatcacggtatacctgcgggtccaattccctggtcaccacatgctctggcagcggcatccccgacatggacatttctgataaaatggccaggcccaggccttctctgatcatactgatcgaggtgttgatgttatagaccgtgaaagctgggtgcagcgtagcacccgcctgcctgaacatatcgataaatggtgattcatagccgccgtcacagacgatcatcggttcatggtcaagatctttcagcgtaatggctgaatgactggcaagcgggtgatcgtccctgagcacgacagccattttgtcttttttcaaatgaatgtactccatctcctctgttggatacagaagaatcccaacatctatcatccgcgtatgaagccactccttgacttcatttacagttccctcgtgcagcacgagctcaagtttcggatatttttgtttaaattcactgatcagcttcggcataaaataagccgaggcagttgagaatgtgccgatatggatcgttcccagttcaagccctttttccgctgctgctacctgctcaactttttcaatgccttttaagacttctctgatgtgtactaagatctgttttcccgtatccgtcagcatcaggccattgcggcggtcacgaatgatcagctttacatcaagctcagcttcgatcgcagaaatcgcatggctgacagccggctgtgtcatgttcagcgcctgacccgcttttgtaaagcttcccgtttcagctattttcacaaaaacctttaattgagtaatggtcataacaatttacttatgctccttataaaaaagattcattttatttatcttatgttctaccgtatcatatgatggaaaagttctacaaggagtgaatgaacaatgaagcagctcccaaaaacgcggacagctctcctgctcgcatttctcgtcatcatgtggggcgtcaattggccgctgtccaaagccgcgctcgcctattctccgccattattgttcgcgggcatccgaacgctgatcggcgggcttttattagtcatagtcgcactgccgcgtattcataaattacgcttaaaagaaacgtggccgatttatcttgtttctgctcttttaaatattacattattctacggcctgcaaacgatcgggctgaattatcttccggccggcctgttttctgcaatcgtcttcttccagcctgttctgatgggtgtattttcttggctgtggctcggcgaatccatgtttgtaatgaaagtgattggcctcatcctcggttttgcgggagtagccgtcattagtgctgcgggctttggcgggcatatttctgtcattggggttctgctggctctcggctccgcagtcagctgggcgctcgggacagtatatatgaaaaaaacaggcagccgcgtcgattccatctggatggtcgctctgcagctgacgatcggaagcgtgtttctgcttatctccggcttttggacagaaagcttttcggcgatccaatggacagctccgtttattacgagcctgctgttcatctccgtattcgttatcgcactcggctggcttgtcttttttacgcttgtcggttcaggagaagcaagcaaggtcgcatcttatacttttttgattccgctcatatcaatcgtggccagctccattttcctgcatgaaccgctcacccttagcctcttggcagggctgctgctgattgtcacgagcatctgtctcgtgaatacaaaatcaaaagcgcagaaagctgcggcgattggtataaacgagaaagctgcacaataataaaaaccctcttgccggatgcggcaagagggtttcttatttactgatgcttgcgtcctttgaccaaatatgcaactgtaatcaaaaggtagatcgccgcagtaatgccggtaatgacaattgatgttgtcatgatgaccccgatcagaatggcgagtaatgccacaatcgcaaaccatgtcgtgtacgggaaccattttacataataggccggtgtttccgtttgctgttttctcgattttaaatgagcgaatccgatgatcagccaaatgaataaaacggtatatcccaatgatcccattaaataattaaatgtttggcttcctgcgaacagagaaatcaatacgccaatatagagagaagaagtgcacatcagaatcgcaaacatcggtacgtttttcgatgaaagcttcgagaagacctttggaagccttccgtcacttgcctgtgtatacaaaatgcgtgatgatccgtataaacctgaattcatagaagaaatgatcgccagcaggatgactgcattcatgatatgatccgcgcccggaatgcctaccattttaaagaccatcacgaaaggactttccggaacggaattgacttggttccatggaatcaggctgacgatgatgaaaaacggcagcaggtaaaacgcgacaatccgtgtcagtgtgctgcggacagctttcgggacaaccttttccggattttttgtctctgcaagcgttacaccgataatttctgtaccgccgtaagagtagatgacgacaagcatcgccgtgatcagccctgtgccgccgtgcgggaaaaatccgccgtggtctgtcaggttggaaaatccggatgctgtatgatcaccgaatgatacaaataagagcagcaatcccagaataataaagataataataacggtaatcttgatcattgccagccaatattcagtttcggcgaagattttaacagaaagcaagtttacaatcgtgacgataagagaaattcctaatgccaacacccagatcgggcagcccggcagccaatattgaatgaaaatcgcagctacaacagcttcagccgcaatgttaagcacccacattttccagtagatccagtccaaaaagtaagcagcgtaatttcccaatacctgctggacaagatcacggaaggttctggcgttacggtttcgaacagccatttccgccagcccctgcataataaacagcaaaataatcccgccgagcaggtatgcgataatgacagatggccctgccacatcgatcgctgagctgctccccttaaataaacctgcgccgattgctccgcccagcgccatcatcataatatggcgggacgtcatcgtgcgttttaacgtttgattgtcgtttttcatcctcttctacctctccttctcgttttcaaaaacaaaaaagcccgccgtctcctacctaatctaatagataaagagacgacgagccttcggctgaccgcggtaccactcttgttgattcttcatgaagaatcctgcttttgacctgtaacgaaggttagccgttaaaacatagggaatattcaatctattccgttccgtcttaccactcccgggcgagttcaaagaagaatcaggctgcgtcgcaccaccccgcagctctctgttctgatcactttcttttactgctcccaatctatgtgttttagttttctgaaaaactcaaattttatgatctgaatatattaacataatatacgtgcttctcttttaactgtcaataacttcagagaaaaaagaaactgttattttgtcccttttcgaatggctttccaaaaggattctgactcgtttcctaatgcgtaaactgaaacacctgctattttatattgctttgccagatggcttttcgtttgaacggttttttcgttttcataccacacgacatgtttatgcttctttttgtcaacataagaaaacgtcatcgagcctgattttttgttgaatgccggctttgctttttgttttttgatgagggatttgagctcattccattcccttattgtgctggtacttccgtcttttacatcccagtcatagccgtacgcagggattcccatgatgactttattggctttgatctttttgactgaaaactgcagagagcttttgatccagtttgtgcttgccactgaccccggctcaccccaaatgccgtgttcatcgtaggtcatgacttgtacgaagtcggcatatttgccgattttcgcataatcatacggccagctccagtcatcatttttatcatcggcgcttttggccggaacggataccattgttttaatatgtttcttattcaaagcctgtgagacatattgaatgaagttcgagtatgcagcgcggtcttctggatttactgcttcaaaatcgatattgattccgtaatatgagtgctttttggccagtgtaattaactgatctgtgaatcgttttttcgctgttttattgctcatgacccgactcgctaaatctccgtcaaaatcataaatggcatcattatagtttgaaatgacagcccatgtcttgatttttttctttttcgcatatgtcagctgcttagttggggcatcgccaatgatttgtccgtttttttcaaacgcaaatgtatcggttgcgatggcattcatgtatgtatgatatttcgtaagagaattgtatgaagccgtatccccagtcgtgtagcctactgtcataccggctgccttcgcttctccttttgtatacataaacagaacaatcgcaatcgccagtgaaaccgctatgatcagccattttttcatcgcatttcctcctgtatcaagtcatactcttctcatcggccaaaaaattggaagttgaagttttttcaagcaaaaagcccggcatatgcctgccgggcttcctgagttcagcggtcagagacgagaatatatgctgcctttactggtccatgcacccccacaactaaatccatttcaatgtcggctgagttactcggtccggtaatgtagttgatacatgaaggaacagtgacaccgttcgcaatgttttggcggatgatatcactggcttgtgtcattctcggtacaatgcttgatttcggcacgatcgcaatataagtcgttggcaaaaggctgacagagcggccgatgtcttttgaggagaagaggacaaccgtccccgactcagccaatgtaatttcgctgaatgtaatccctacattggcttgctccgcttttttaatattttcctcgcctttgtcagcatcccactcccagaccggcgttccttcactcggccagtccttggtgagcaggcttttcagtccgtattcttcaaagcgggggtccttcggaatgatgacagggcctccagaaaagcggctgacttgctcgcgcagggcatcgtaaaggccggttgaatccgtttcaatcagctctgtatggattttgacacaatggtttttgagcactgtgactaagtcatccgctgaataaccttcaagtgttttatattgcggctgatgcgcccattcagggactgccacgcctcctgttcttcgttcacggcccaggctggatgcgattcggtttaaaaagctctcttgattctgaatggttcccttcgtcatcactgctcctccttcgtgcgttcacttgtttctctgtccgcaaaccagtctctgaatctcgatttatgcggtgccgggaagtcgcgaatctgggtccaatttttaagcgggccgggccctttcgaaattttttcgtcctctgtaaaaggcgtcatggcggccggcgcccattttgagcccattttgtaaagcgataaggaggatgcgccaagtccgaatgctttcattgcaagcttttcactgatcggcgccctgccttctttttcgacgatattctgacgatgcttgagtagcagctcatgaagcgggattttgaccgggcaggcttctgaacaagcagcgcacagtgaagatgcgtacggcagctccttataatcgtcataaccgccgagcaacggtgataaaacagctccgatcggccccgagtagattgagccgtatgaatgtccgccgacatggcggtacacaggacagacattgatacaggcggcacagcggatacattgcagcacagactggaattccgttccaaggatattggatcgtccattatcaacgatgacaagatggaattcttccggaccgtccacttcaccttccagcttcggacccgtcaaagctgtaatatagcttgtcagccgctgtccgacagcacttctagtcagcatgctgactagcacttcaaattcagaaaatgacgggacaatccgctccattcccatgacggtaatttgtgttttcggcaaggtgctcacaagccgtccatttccttcattggtcacaaggctgacggaacccgtgtcagcgatggcgaagttacagccggtaatgccgatatccgcttccagaaactttttccggagaatggcgcgcgcatgcatcaccagctcttccggtttttctgtatgttgatagtccagtctttctttaaacacatcgcgtatctgctctttatttttatgaagagcgggcgctacgatatgtgacggcggatcgtgatcatcaatctgcaaaatatactcgccgagatcggtttctacgacttcacagccttccttctccagcacctcattcagattgatttcctctgtgaccattgatttagatttcacaattttcttcccgttcttcttttgaatgacatcccgaatataggaagacgcctcttccgctgttttcgcgaaatagacatgtccgcctcttttcgccacattttcggcaagctgtccgagatagaaatcaaggttttcaaggacatgctgcctgatttcctctgataatgagcgccactcctcccagtttcccagttcttctgctgcctctaggcgccgcgtccgcagacgctcctgtgcacctgaaacagcgcctctcataaattcattatcaatcccctgtgatacccgctctttaaaagcgtcagtaccgattttcatcgccatgatcctttccccctctgaatccagttttatctgctgttgagcacttcggcgatgtgcatcactttgacattcttatcttttcggccaagccgtcccccgatattcatcaaacagccgcagtcagcaccgatcagcacctctgctcccgtttcctccacacattcgactttttcatcgaccatctgctcagaaatctgcgccatcttgactgagaacgttcctccgaatccgcagcagttatgtttgcccggaagctctgtaaactgcaggcccttcacatggctcaacagcttcatcggctccttccgaacacccagcagcctagtcatatggcacgacgtatgtaaggtcgcttttgtatgaagggtcgcgccgacatcctctaccccaaggacgttcacaataaaatctgtcagttcatacgttttatccgccagctttttcgctttatcggcccatttcggatcatcctgaaacaggtgcggatactcccggaacatcgttgtgcaggaacccgaaggactgacaacatattcggaatcctgaaacgtttcgatcatccgtttcattgcttttttggcgtcatgtacatagccgctgttgtaagccggctgtccgcagcaaatctgcccttctggaaaatcaacctcgcacccaagccgctccagcagctcaaccgttgcttttccgacatttgtttgaaacatatcaacaagacaagtgacaaaaagtgagactttcatgatgaacccctctctcatccccaatatatgatcaggtcatctgatgacctgagttaaaataactatatgaatatcgtacactattctgacaatggaaggaaagagttttctagggatattttcatttgtggcatatcaaaaacactcccgatctcccaggagtgcagtatatggttagatccagcccttttcctcagcgatgctggcggcttctgtccgatttttcgcattaagcttttggatgatttctgagatatagtttcgaactgtgccttgagataaatagagctccagcgtaatgtcttttgttgtcttgcctaaagccgcaagcctcagaatttcttgctctctaacggttagcggattttcgtctcgcatcatattaaacgtcagctcagggctgaagacacgttttccctttacacattttcgaatggcatcggccagatcgtcaatttcaccgtctttcagcagatagccatgtgcaccggcctttacggcgcgttcaaaatatccggggcgggcaaaggtggttaaaataatgaccttgctgacgcagccttttttcattaattcctctgccacattcagcccgcttcgaaccggcatttcaatgtccataatgcatacatccggctccagcttcaaaatagcatgtagcgcctcttccccgtttaatgcttgtccgatgactgtcatatcctcttctaaatcaagcaaagatcccaaagcgcctaaaagcattcgctggtcctcagcaataaacagacgaatcattcttttcgtcctccaatcattctgcttttttaataagcggaatcgtcagtgccacaaccgttccgttatggtctgaaaccgttaatccccttcaatgagcatgagccgttcttccattccccacaggccattcccaaacattttctccttcggcgctccctttccgtcatcccgtattacgatcctcattttgtcagcaaattgagaaatggtgatggcacagtgggttgctttgctgtgcttgataatgttagtcacggcttcccgcatacacatactgataatattttgagtgacgggagatatcactgaaaagtcgtcggctccttcgtattgaaaggtaatgttccccgctcttaatatgtgctgaatgtttacgagctcctctgttatcgtgaccgttctcatatcagaaaccagctctcgaacttgcttgagtgcggagcgtgaactggtttccatttcttttgcctcaagcttggtccgttctggatcagatgcagccagccgctgaatgagctggctttttaatgtaagcagcgacagggtgtggccaagagtatcgtgaagatcacgggcgattcgaacacgttcctcccttttagagagttcttttatctgttcgttggcttgtgcaagcttagcttcaagctcaatcctccgaaacatagaacgaattccgaatggagaaatgagcataatgacgagaaacgggagaacagaaaaaagctcccgaagcgagaccgaattcgcgataaattggtataggcatggaaaaagcagtataaagattaaagcgcagaacgcacggttaaaattcgttttctctttgtaataaccaacaaagtttgccggaaaaaaacctaagtatatataggtgatattgtaaaacacactatacatcaaaataaccgccatttgcacgataagccaatatgtaaacgaagctttgcccacgctgcagaataactggcgatatgccgctacaaaaaggagcagcataccatatccgatcccctgtttgacccctgattcttttaataaagagaggaacggcataatcgtatacaccagaaagatataagggaaaaacccgaattccttcgggaaaatagatattgcctttttcatgtattacaccgcttcttgttttcttcttatatatttagatagtagcatgaagagcatcatataagcgattaatatcagaatatttttccaagtcggactcccaccccggacaagttcccacgctccgctcccgaaatgataagacggaagccactggccaatgctctgcatcatgtcaggcatgacctcaaacggcatccacatccctccgcctaaagccagcagcatataaagcacattactgattccggccgctgtttctacttttctcatgaggccgattagtgtgcctaatgctaaaaaaggcaatgcgccaaacaaaatccacagtccgctcatcatccattcaaacggtgacaaggcaatatcattgatgattgcgccgaacagaaatatgacggtaattgataaaacgtgaatgacactttggccgatcatctgagctgataaatagatatgatccggaagaggcgtaaggcggataaaggcggcccagccttgtgaccgttcttgtaccattcggatgccaagcgtcatgatagaggaacccatcacgctgaagactgtcatcgacatcaggtaatgggcttcccatgcacgttgatcagggacgttggtattcactacatttgtaaagaaataataaaaggcaatcggcatgatcagagaccaaagcacaaagtacttgttcctaagcacccttttcatttcagcgatgctttgcttttgcagcacgttcactcacatcgcctccctgttgccgtcagccagctggcgaaatgcctcatcgagcgttgcttgctcaattcgaatatcccgtgcatgtatgttttcttgaaagatcagcgccaacactttgtctgtatttgatgtctggatgatggttctctcatgctcgtggatcactctctcgacttccgggtgacaagacagcctttccaatgattcacttgaatgaagcgtaaaggaaacagactgtttttgaattcttgagcggatttgcattggtgagccgtctgcaacaagctgtccttcagtaaaaaataggattcgctgtgcggcatcatctgcttcctgtaaataatgagttgaaaaaataatcgtttttccttggtccgacagtccgtgaatggtctgccagaatcggtgtcttgatgaagtgtccatgccgactgtcggttcatcaagtataagcagctccgggttcccggcaagagccaaagcaaagctcaaacggcgtttttgtccgccggataatttttctgctcttgttttcaaatcttctttggtgagtgctgttaacgaaacgagttctttcatggacaatggattcggataatagctccggaagagttcaaggatttcatccaccttaaggcccggcatgacacttacttcctgaagcattacacctattttttcacgaacctgttgatcatcgggaacccggttaaatagtttgatttctccctcactcggtttcagcaatcctaatatcatcgagacgacggtcgtcttccctgccccatttggcccgagaatggctgcaatttctcctttttcaatactgaagctgatgttgtttacagcggtttttcgctggaaatgttttgtcacgttgcttactgttactgcttctttcatcacatgagcacctcctgatcgtttacattgattgtaaaatgacggagaagacgatgttagtatggggtgtcatgatgatggagtgacaaatgtcatttttttctcaccccggtgtctaggcaatcctcctcctgcatcttccaattcatccatcttttctatctcccatgtcctctttcttttaaactgctgtgacattcatagaaagatacactcttcaaaccatccgagtgttatgatagaaatattgaactttatattactttccggctgaaaggagccaatcatgaacgaagcgattttgtctagaaatcatgtgaaggtgaaaggcagcggcaaagcatctatcatgttcgcacctggttttggatgcgatcaaagcgtgtggaatgccgtggcacctgcctttgaagaagatcatcgggtgattttatttgattacgtcggttcgggacattcagatttgcgcgcatatgacctgaatcgttaccagacacttgacggctatgcccaggatgttcttgatgtttgtgaagctttagatctgaaggaaaccgtgtttgtgggtcactccgtcggggccttgattgggatgcttgcatccatccgccgcccggagcttttttcccatctggtgatggtggggccttctccttgctatttgaatgatccgcctgagtattacggaggatttgaagaggagcagctccttggcttgctggagatgatggagaaaaattatatcggctgggcgactgtatttgcggcaaccgttctgaatcagccagatcggcctgaaattaaggaagagcttgaaagccgtttttgttctactgatcctgtcattgcccgccaattcgcgaaagcggcgtttttttctgatcaccgagaggatctttcgaaggtaacggttccctctcttattctccaatgtgcagatgatatcatcgcacctgcaacagtaggtaagtatatgcatcagcatctgccttatagcagtctgaaacaaatggaggctcgcggacattgccctcatatgagccatccagatgagacgatacagctgatcggcgattatttaaaagcacacgtgtgatataggaacgaaagggatagaggtgaccctcttagatggacaaacaattgaatgatgcaccatgcggtttcctcgctttgtcagaagaggggtcgatcatagctgccaaccgcacccttatcaagattctggattatgaaccggagcaggttatcggccagcacatgaatatgatgttgaccattcccgcgcagcttttctgccagctttatttttttccgcttttgaaattggagcatcacatcgaagaaatatacatttccctgaaagcaagagatggagaagaaattcccgtccttatcaatgctattgcgagacacgatagcggggcttctgtctttgattgtgttctgattccaatgcgaaagcgaaatgaatatgaaaatgagctgctgatagccagaaatgaggctcaggaagctttgcttgccaaacagaaagccaatgcggagttagaaattgccttggaaacgctgaaagcaaaacaagaagaacttcttgagatcaataaacaaaatcaacaatttaaattaaacaccaaaagagagcttgaactcgccagaaagatccagaaaaactcgttgactgaaccgattgtaaacgatcaggttcagattgactcttattacaacgcatcgagtgaattgtcaggtgatctttacggatattatcaaatcgatgaacaccgttacggcattattatccttgatgtgatggggcacggaatttcatctgcattgattacgatgtctcttcatcctttgttccagcgccagatcacgcaaggtctcagccccgttaaagttatgaaggaattggaccggcaccttcacagcttgtttcaaaatgatgaggaagcaagacattattgcactgctatttatctcgagattgatatagcacggcaaagaattgattatgtcaacgcagggcatccgccggcactttggcaggacgatagcggaactcaacatctgcttcacgcgacctcgcctccgatcgggatgtttgaagacttagagtttcagtcaagcagcctttcatacacggaggacggaagattgcttctgtatacggatggcgtgatggatcctacggcttcatgttatttatttgatttactaaaggatcatcctgattcgccaatcgctgacctgaaggagaaaatccttacatcactgcagcatcaaaaggaagctcatcataagagtgatgacgaatgttttatattagttgatgtaaaataaaatgatccatgagacataacaatgatttgttacatctcatggatttttttgtttcagcgtttctttggaatatgtcctgactccgcatattgaaacacctgcaaggaaggcagcgggtgtccattaaaatcaaataaagcttgattatctacagcacttcccccataccacttcccggcgtcttcagggtcgtattcagcagcatagctggacgcccaccctgacccgtatgtttcccataacactttgtttttctctatctgtgtcttcggcccgactggaatccacgccggctcccagtagaaaacaccaagtcctgctttgcccgtattcgccactgcctccattacatctcttactgcagttgcctggccttgaacagaaattggatatggcaacgtctgcccgctttttggtgctgtatttccatgcccatcgccatcctcagcggtataggtgtacgatgtctccgccaccatgacttttttgccgtacgtattggcaacagccttcagcacggaggtcaaattttgtaatgtgccatgccagaaaggataataggagctagcaaacacatcataatccactttgtttttgctgagtgtttctgcaataaatgaataccttccagccgtttcaggattggtaaaatgcagggcgaccaaaatatttgaatttgtctccctgaccgctcggcttccttcattaaataattggcacatcttcgtccaatcagtctcaccggcaaatcctcctgttgtttcatttccgacctgaaccatgccgatgtcaacgccttccttgatcatcttttgcaggctttgtttcgtatactcatagagctttgctttttttgcttcaaagctgagattcgcccaggctttgggcaccttttgtttcgctggatcggcccagaaatcagagtagtgaaagtcggccagcaccttcattccgttcgctgtcgctctttttccgatttcgatggctttttgaacatcattgtttcccccgccatacccgttgccatttgaatcatacgggtgattccagatgcggacgcgaacatagttgaccccagcctgttttaaagttgtaaagatatcctggcgttttccgtttgtattgtaaaaggtgacaccgctgttttccaaagcaataacgctggatacatctgcccctttgataaaatccttgttcatcccctctacttttttaacaaaaagatcctctgcccgaagctctgacacgtgcttctccttctcaatggcagcggcatatcctgttgaactacatgcactccacacgatggcagccgcaaagaacattttcactttgcttttcatgatttcatccccccaagacttagcaagcgttttcattctatagaaaaaagaatccgcccatatcgagcggagcatcagcctaatgtgtgtttacgacaattctcacttcatacttttccatcgtcaggtcgcctgacaatatgtctcctgtcattatgtccttcacactctgatcaaacgtgaccagctgtttttcttccgtgaaattcatgacaaaaatataatcattgtcctgatcctgcctcgcttgtacggagacgccttttccgtgccgaaccggaaaaactggagagagagacaggtctgtgatcagaccctcatagaaatcacgctgaaattgatcctccaaacgcgcgccgataaaatacgccttgccctgctgatactcatggcttgtgaccgctggcgtgcgcgcataaaaatcttcttgatacaccgcttccactgaagctgtctttacatcaatcacggttgcataatccttcatttcatatatttggctgcggtagctgacagcgtttcgatccttcggatacagggtgtccgtttcaagaggctcaactccaaatatagcttgaagatccggatgccatccgcctgtgtatgttaagtcatgctcattcacaaccccgctgatatacgtcatgactaaggtgccgccgtcagccgtaaacgcttttaaacgggaaacggtgtcctcgctgattaaatacagcatcgggacgatcagcagtttatatggtgaaaagtcttgttctttcgtgatgacgtcgacagggatatcgtgttcccagaatgtgcggtaatgctgctgaagcgtttgcggataacgttttgtcgccttcgcaaacccctgagcatcctcgagcgcccaatgattttcccagtcatataaaatcgcggtttgagccggcctcttcgttccgacaacttcggacagccgttccaatgtctcgcctaccttggccacttcttgaaagacgcggttcttcgggctattgtcatgatccacaaccgctccgtgtaatttttctgatgacccccgtgatttgcggtattggaaatagagaacgctgtccgagccgtgggcaatcatttgcatggatgacagcagattcatgcccgggcgctttgccttgttgacgttatgccaattgaccgcgcttggcgtacactccattaataagaagggctgctgcttcaagcttcggtacagatcattgataaagccgaccttcatcgccaaatcagctgtgctttcccagtcattgtgccagacaggataagcgtcccagctgatggcatcgacatgctttgcaaatttgctgtagtcgaggccctgatacgggatcaaatccggtgtgtcagccataaaattcgttgtgatagggatatcaggcgtcaattctttcagcggaatgatttcattttcataaaacgaaatcgtttgatcggtgacgaaccggcgccaatctaaattcaggccatgcaagccattttcaccgatcggcgaagggctttcaatttgtgaccagtcattgaacgtatggctccaaaaaggggtccaccacgcatggttcaatgtcttgaggctgttgtcatatttcgatttcagccactcccggaaagcatgctggcataaatcacagtggcaatctcccccgtattcgtttgaaatgtgccacattaacagcgccgggtgatgtccgtatcgttctgctaataagcggttgatgtgccgtgttttttctcggtagactttagatgtgaggcagtggttgtgccttccgccgtgcagctgtttgacgcgggaggcattgacgcgcaaaacttccggataggtttgcgacagccaggccggacgggctccgctcggcgttgctaatatgacccggccgcctatactgtgaatccgctcaaaaatatcatccagccattcaaattgatatacgccctcctccggctcaagtgcgctccatgcaaaaatgccgacagaaaacgtattcgtatgagaaagcttcatcagtttgatatcgtcagctaaaatatcgggccgatccagccactgatcggggttgtagtctcccccatggagcataaattttgcttttgttacgtgcgttttttcaagctttgacatcacattctcctccttgttctcttagcccttcgttccgcctgcggttaatccggacacaaaattcttttgcagcataataaagatgacggcaaccggtatgctgataagcagggctccggccgcaaatgtcgtatagctggcccccatgacatcattcactaaattgaatagaccgacgggcaatgtatatgattcaggcgttctcaatatggttgaggacagcacaaaatctccgagcggaccggtaaagccgttcatggccacgactgccgccatcggttttgataatggcagaatgatctggaagaagattctggtgctgctggctccgtcaatcttggcgctttcgtctaaatccatcggaatggaatccatgtaccctttcatcaaatacgtattcatcgggatcaggccgccgatataaagcaagattagcagccagtggctattgatcattcccaagatttgcgccagcacaaacaaggcaattaaagctgaaaactgaggaatcatctgcagcaataaaaagagcgttaaagcgtatttcctccctttaaaccgaaagcgcgaaaacgcataggccgtaaacgtcacacagagcaaagaccctgccattgtaaacaggctgatcttcatagagttgacataccactgcacatattgaaggctttccttgcccgcaaataattccttgtaatgatcgaatgtcggatgcttcggaatgatggatgtactgattaagctgttgccgggattaaagcttgcgcctgccgtccaaaggagaggataaacaatgatgaccgccataaaggctagcaacaagtaagagaaaaggagacggatatatcttctgactttcatatctgccagcataccttatgcctcctctttaaaagactttgtctgtctgaactgccacaatgcgatggagataacaaatacagataataaaatggttaaagccgcagcaagtgaatattggctggactgcattgtcaatttataaatccatgaaacgaggatatctgtcccgccggctgttgatccggttacagccggacctccgccattgaatagatagataatattaaagttattaaagttaaacgtaaactgagtaatgataatcggagccattgcaatgaacaccatcggaagcgtgatgtatctcagctttgaaaagacagaagcgccatcaatcgtagctgcttcatacagatcgtccgggatggattgcaatacgcctgttgagacgagaaagatgtacggaaatccgagccagccctgcatgagaatcaatgcaagcctcgaccaattggcatctgtcatccacggaagcggatctatcccgaagaaagccaagatgtcgtgattcatcgcaccgaagctatcattaaacagtcccgcaaaaattaaaatcgtcacaaaaccgggaacggcccatggcaaaatcagaatcgtccgaaaaaaacgtttaaaccgaaggtctttctggttaacaatgatcgcgagaaaaatccccaaggtgacttgcagtgtggatgcagcaagtgtccaaaccaccgtccaagccagtacatcaaaaaaagtcgacctccaaatatcaactgtgaaaatatttgcgaacgtttgaaaaccgacccaatcaattaattttgcaggaggagaatgatacaaatcatagtttgtaaacgctaatgcaaagctgaataagataggaaagatcacggcgaaaattaaaataaacaaagatgggccgctgacgacataaggatagccctcagaaatgatatgctggtattgttcctttaaggaacttaatggcttattttcatcacgctgttttccgctttggaacgcatcgcgaagatttacataatacaccgcaaggccaaagcaggtcacgatgacagcaataatcccttccgccagcagaaaaacggaattatcccgcggcacttctgttcccagtgtaaagattccccaaaaccccatattgagcagatctccaaagaccgcaaaaaacgatgcgcctaagaaaagaaagacaataccttttatccattgcttgttataaaattgcccgagtcccggaatgatagaaagcaacaaagcgacttgacgatgctgcaccgttttcacctctcttacaatacaaatctagctttctctttattttccgctgtgctttgccttaatttgtcctttggccgtttcagctgcttgatccaatgcttgtttcggatctgccttccctgttgcaaccgtctgtaatgctgaatcagccggcgtccatatttcattcatttccggaatatttggtgttggctctgagaaacgggattgttcagtaacagcccgtgccgcctcgcttttcataatagccgggtcattggctagggatttcacagcaggaacttctttcgtttcttcatatcgtgttttagaatttttttcatttgccaggaaaacggctaattcttgcgccagctcttcattctttgaaaatgcactgacgttgtagcttttgacgccgataaaggagctcatgtttttcccattttccagcttcggcagtttcgtaatgccataattgattcctgcattcgaaaaggcttctacattccatggaccagaaataattgcggcggcttttccttctgtgaacagcgattccaacacgttaatcccttgttctccaataatgccagccgggaacaggccatctttgtaaaacttctgaatcagcgccgcacctttgacagctccttcattattgattccaatgtctgacgggttatagctcccatctttggcctttccaaaaatgtatccgccatatccgctcatcacactttctgcataataaatttgatcgaatagggctaaaaagccaaatttgctgccgtcagcagtctttttggaatagtcgtaccactcttccagcgttttgggcaattccttttctgtgatgagatctttgttgtaaaaaagcacagtcgtttcgaccgcttttggcagtccataaagcttttgatctaccatttgagactgaatggaagcgtcagtataaagtgattgaacgtcttttttgacatgtaattccttgagtaatccttccgtgacagcggttccgatttggtcccctggcattgttaacacgtcagggcctgtgccggccggtccatccattcgcaaatcttcaatctgcttggcatacggtttttcaacgactttgaccttcacatcatgctctttttcaaatgcagccacagcgtctttaatgccgttgctcttttctttatcctcccatacaacaagctctgacccttttgaactcgatttggcgctgctgctttcctttgggccgcaagccgccaaggataaactgacagctgcgcagagcatgaatacggaacacttttttgccattttcattgattgtcaccctttcggtaggaatgaaagcgctttaaagataatatagcatgcctgagaaaatgtgtaaacaaactatttacttcatagagtaaatttttttacctaaataaaaaatgacttagtgtcctaagtcatccttaattcatactcttcctgacgattaattctgcgcccacatataatgtttttaccgttcttctcttgtcctgcacttgttcaagcagtaattgaacagcgtttttacataattcatgtatatcaatatgaaacgtcgtcagaggaggcgagacatacttcgcgaagctgatgttgttgatactcacaatgcttaccctgtttggtatggcaattcctttttcgttcagggcttgcagacagcccactgcaatcgggtccgctgcaatcataaaagcagtcggaagctgatcgcctaatgtgtcgatcgctgctgacatcaggcggtagccgttttctacagagaatccgcgatgacagaaaatatagcgctcgtccagcatggctttttccctcatataggatctgaaggtttgttcacggatgtccatttcatcctgattggtattcggatttttgtatgtgccgccgataaaaccgatgctcttatgccccttctcagtcaggatgtttaccgtcttccttgtcatttgtgccaaatcgggccttaccgagtcaaaatgatcgggatcaggagttgaatcgatgaacacgccgttttcagtgagatttctgaggaaagccagctcttcatctgaaaatgtgccgacggcaataaacccttccgtatgttcaggaatgctctcgattccatccgctattttataagtggtcatatcgacattgaatgctttcgccagtttctctacttctaatctcatcgttttaaaatagacatcttctaattcttctttatctgtcagccaatataaaaacgcaatatgtttcaccagcggccttactgtttttttgcggtaattgagcttttccgccgcttcatagattttctcccgtgtctcatcaggaacagaaaggctttcatcgttatttaaaacgcgggaaacggttgagattgaaaatcccgcttcctgcgcgatatctttaattgtcgccattgtatctgcctccattattcagctcgcattgttttagtaaaatattttactttctttttcacaaatgtcaagtgcacaaagccctctggctgccatgtaaaaagactgaaccatttgcggctcagtctcagttgttcgtatcattcggaaccggcggaattgcccgggaaatgagttggttattgcacattttcctcgaaatatcccgaaagcacatcttccacattcgtcaaatgcgccagcatggcggcttccgcctgtgcaccgttcccggcagccacagcattgtaaatccgttcgtgctcctcatacagccgctgaacggaggtcttcttggaaaacagccagattttcctcgtttccctcattgtttccagcagcaatgatgacacgtgattcatcaagtgtttaagaagttcattttgagaagcgtccgcaagcgcaagatgaaatgcaaagtctgctttctctcccagctccccgtccgcttcaatgctgcccatttcctttagtgcatcctgaattctttcgagatctgcttctgtccttttttcagccgctagtgaagccacgccgatttcaagcagttttctgacctcgagcagctgcttgacgtcctcttttttcatcagaagggcggctgagagcggctgagaaatttgattgagctcaaattccttcagatacgtgccttctccctgtttcatttcgacaagccccatcgcttttagcgcagaaagtgcttcgcgaaccgctgaacggctgacttgaaagctctcagcaagcgcctgaacagagtccagtttatcccccggcttcaattcgccatttttgatcatatctaatagggcatccgctacttcttcatatattttttttgttttaatctgtttatatttcaatgcaattcaccccgtaacttgtaggtctggctgtttacgatctattatactctgttttgtgggccgccaaaagattttgactattttgtcaaaaagtcttgtactttgatttttttcaaaatataatgctaggtaactggtcttattacccagtcatcagatgatcatatcatctatagaaaccgcttacatatggcgccagtttatgtttcaaggaggggtttgggatgcaatggacacaggcatatacgcctatagggggaaatttgctattatcagcgcttgccgcacttgtaccgattattttctttttttgggcactcgcgattaaacggatgaaggggtatacagcaggcttggccacattggggatcgcccttatcattgctgtattggtttatcgtatgccggcggaaaaagcgctgatgtccgcgacacaaggagccgtatacggattgttgccgatcggctggatcattgtgacgtctgtttttttgtataaaatcactgtgaaaacgggacagtttgatatcattcgcagctctgttctctcgattactgatgaccgacggcttcaagctctcttgatcgctttttcattcggggcttttttagaaggggcagcaggcttcggagcgccggtcgccatttctgccgcgctgctggtcggtctcggctttaatcctctttatgctgcggggatctgtttgatcgccaatacggcgccggttgcctttggggcaattgggattccaattacagccgtagaagggccgacagggattccggcgatggagatttcgcaaatggttgggcggcagctgccgtttttatccgtatttattcctctttatttaatcatcatcatgagcgggttcaggaaagccttggagatctggccggcgattctcgtatccggtgtttcctttgctgttgttcaatatctcagttccaattttttagggcctgagctgcccgatgttttgtcagctcttgtttcaatggctgcgcttgctgtgtttttgaaatggtggaagccgaaaacaacattccggtttgccggtgaacaagagtcggccgcctcaattgaaacggcgcgcacaaatccggcggcgcctgcatacagaggcggacagatttttaaggcttggtcgccatttctgctgctgacggcgatgatttccgtatggggcattccatctgtcaaatccgcgctgaccgggcattatgaaggctctgcggtgttcttgaagtggctgaatgctgttggagaaaaactgactttttcccccggtgtgccttttttgaacaatcagattgtcaatgctgacggtacgccgattgaagcggtttacaagttggaggtgcttggttcggccggcaccgcgatattgattgccgcagtgctgtcaaaattcatcacggcgatttcgtggaaagactggggaaccgtttttaaagaaacagtccaggaattgaagcttccgattttgaccattgcttctgtcgttggttttgcctatgtcaccaactcctcgggaatgagcacgacactcgggatgacactcgcgctgacaggttcgatgtttaccttcttttcgcccgttctcggctggctcggcgtcttcattaccggctcggatacttctgccaacctgctgttcggcaacctgcagaaagtcaccgcattatcagtcggcatggaccccgttctgtctgtggccgccaactcttcaggcggtgtcacaggaaaaatgatttcaccgcagtcgatagcggtggcgtgcgccgcggtaggactcgccggaaaggagtcagatcttttccgctttaccattaaacacagtctgtttttgctgctgctcgtctgtatcatcacctttttgcagcatcacgtattcagctggatgattccttaaaaaaatcctcccgtctagggaggattttatttatatcgctttctcgctgccgatgacggaatattcatttgatcgcgatattttgccacggtgcgtctcgagatttggatgccgtgttgttcatacagcaaatcgacaagcttttggtctgaaagcggttttgttttgtcctcttgattgatcaggttttccagatgcgttttgactgcataattcgacgcatctccatcacctgaagcctcggcttttgctgagaaaaagagtttcatctcaaacagcccgtaaggcgtttgtattgttttccctttaatggcccggctcacagttgattcatgaaggcttagacagtctgccacctctctgagagtcagcggcttcattgcgcttcgccctttcagaaagaaatccttttggcgtgtgatcagttcattgataattctcgtgattgtctgttttcgctgccgcagcgcgcggctcagccagcgccactcctgatatttcgcagataaataggagacagtatcctgacaggagccggatgataaaagcgttctgtactgcggatgcagatcgatctcgggaaacgagcgggtattcagttccgctgcgatgtgcccattttttacggtgataaaaatgtcaggctcaatatacacatcttgctctggccgggcaaacagaaggccaggtctaggatgaagagccgcgatatcatctgagatatcttgaatggtatgaagcggaattcccgtctctactgaaagcgttttccattttttttgcgcaaaagcatcaaaatgagctgaaaccagcatttccgcttgttcatttctgttcggcagccgctgtaattgaagaaggatgcattcctgcaaagatctcgcgccgattccagccggttctaacgactggagttttgccaaaacagcctccgcttccttggccgatacagataatcgccgtgctgcctcctctatatcttcttccaagtacccgtttgaatcaagcgaatgaatcagataattaaaaatctttttttcagtgtttgtcagattcatatcgagtgactgctgttttaacgcatcctgcaatgttttttgcggattacttaattgaaggcccgcttcctgtgcattcatcctgtttttgtttgttttatggtaagatagtggcggtgtgtctgtttcctttcgttcaataagagggttttccagtgagagctcatcaatgtactcggcgagttctgccgaatgatagccaagcagcgtgatggcctgcctgagctcctgtgtcagttgaggctttaatacttgtacttgctgaagtttcatatccatcttgctcactcccctttcttcattgtacatgattgagatcacaccgtatacatttatgaaaaaggagctgccaaagaaatgtctgaacttttttccgtcccttattttattgagaatttaaaacagcatattgaaatgaatcagtctgaggataaaatccacgcgatgaacagctactaccgttccgtcgtctcaacactagtgcaggaccagctgacgaaaaacgcagttgtcctgaaacggattcagcatttagatgaagcatacaacaaagtcaaacgtggagaatcaaaataaaccttccgctcacatgtgagcaggaaggttttccttctttgaggcgtgctggatgagacgggtgcttggcacgccttccatccaggtatgaaagtaattggcgtttttcccgtaggaattatcaatgaccgtgttttctttttgaagaagagaagacaggatgtggccgtgcagccttgatgtttccaccgattcgtaacggctgaaaaaccgaatcgctttttggacgatataatccgagtatttttcccatatatacgcaatgggcaaagggttgcctgcttttttattcaagacgttcagcgtttggagaaaagcaatcgtccggcggtctgaagctgacagcaccgtgcgccagtcgtagctttccgcttctgcgtgttcctgaagcgcctggtttgcttcatgatctgttcggataaatctcagcttttgattggacggctgctgcgtgggaatgacgggaaacagctgatgagccatatcaggcagaagctgaatgtgatttgttgtaaaataggcctgtgccgtagcataggaggctttttcccttgtcatgatgtgaaggttcgcatgcttagaaaatatctctgccgtccgcttgaggttgtctttgttttgaaaataaatcgattgcggcaggatcacaattttgtggttcggataggtttggacgattttctctctaaagccttgataatacggatacagatccccgaagtttccgcctccctggcagacgatgatgagattcggatcaagctttcgcccgattgggaaattgtctggattccagcgttttctgacccgaatcccgtgttctttaaagaaggcttctgttcctttcataataaataaatcccctacattcccatatagaggatagtcagcatatataatctctgattgtttcggaatgacgtcgagcagcccggacagtttctgtttcaggctgatcatcgaatgcttgctgtccatttcttcacctcgacagtatggaataagtgcagtagcacttcaatgacccggccttgctcatcttctgtcatattggaccccgatgggagacagattcctcgcttgaacaaatcttcgcatacgcttcctgtatcttcatgagaataaaataaagccggatcgaacagcggctgggtatggagcggcttccacagcggacgggcttcaatgttttcttcagcaagacgttgaactatgtcatatgggctgagcccgttatcaagtgtgagcgtggtgagccagcgattggatacgcctgctgcgtactctggcataaagcggacgccgtctaagtgaccgagcgcatttttgtatctcgtgaaaatggtccttcttttctccactcgctcatccagcacctcaagctgggcaatgccgacgccggctaagatattgctcagcctgtaattatgtccaatttcactgtgctgataatgaacagccggctctcgtgcctgcgaagcgagaaatcttgctttttcaattgcggcttcatcatttgaaacgagcatccctccccctgatgtggtgatgattttgttcccgttaaatgaaaaaatgccgaagcgcccgaatgttccgctttgcttccctttatagactgtgccgagagattcggctgcgtcctcaatgacaggaactccgtatgcatcacacaggcttacgatttcatccattttcgcgctctgcccatatagattgacggcaattaccgcttttggcagtgttccgtttcttttcgcttcctccaatgctctttcaagggctgtcggcgacatattccacgtatcaggctcagaatcaataaagacgggcaccgctttttcatatagaatcggattggcggttgctacaaatgtgaaggactggcaaaacacgctgtcaccttcttttacctcaagcaaacgcagcgcgagatgaatcgccgccgttcctgagccgaccgcagctgctgcttttacaccgactcgttctgccagctgttcttcaaatgaattcacgagcggcccaagcggcgcaatccagtttgagcgaaaggcttctgaaatatagtgctgctccctgccgctcatatgagggggagataagtagatttttttatgcatagaatcatcctttgtttgatgtttgaatggaagaaatgatgcgtgccggagcaccggccgccgttaccctgtccggtatggaacggatcaccgcggagccggctccgacaatgctccaagccccgattatgatctgcggtatgacggatgcaccggttccgacgtgagcgccttcctgaacggaaaccgctcctgacagcgtggcacgcggggacagatgaacgtaatcgctgatttgattgtcgtgctctgccactgcacccgtattgatgatgcagtgggcgccgatgcgcgcatccgcctgaatgatcgcgcccgccataatcactgtcccttccccaatgacagccgacttgctgacgatggctgacgggtgaatcaatgtaataaaatcatctttccccagtcccagtcgctccgccagctgttttctgacactgttattcccaacagcaatcagaaacagcacatcaggaatgagcctgcgcagttcagtaacggctttcggcggtcctgtgtaccattcttttccgccttcgaacgttttgaatttatcatccagcaccgcggctaagcgcgtatctgagcgggcgtttatcagctctctgatcacctttccgtgaccgccgtcacccacaatggccacatttttcatgaggacacatctccgcttccggtaaaccgttccgcggtcacatgattggtttgctgaatcccttctgaaacaaggacctttcgcaccgtcaaacataaaattttcaaatcgagaaaaaatgaccagttgtcaacgtaccaaacatctaattcaaatttcttttcccaggaaatcgcgtttctgccattgatttgcgcccagcctgtgatacccggcttcacctcatggcgccgtgcctgtttttctgtataaagaggcagatagtccatcaaaagcggccgcggcccgacaaggctcagatcgcccttcaggacattcaggagctgcggaagctcatcaatgctcagctttctgatcagcctgcccgttttcgtcagccggacttcatcaggcagcagatttcctttactgtcccgttcatccgtcattgtccggaacttatatagggtgaacggtttgccgtgcaggcccggccttacttgcttaaagaagacaggtgatcctattttcagcctgacaacggcgatggtgaacagaatgatcacacttgtacagcacaacaaaaaaatggcggccgtcagatcaaaaagtcgtttcaggatcaaagattcacagctcctttcgtttttcgaaaccgttttaataccagctgtctttcctcttttgtacaaacgagcataaaagcgaaaacagcgtagcaaaagctgactgtcactcccgtcgctatcaatgacggccagctgtcaatcttcacaatgaactgaattgccttacagaccgtccaggcaaatacagcggctgaaagaggcccgattatgcctttaaggaacacgtgctttttgtagcctgtaatgcgggatacgtaaagcggcgtaaagatggcattttttaaaataagagaaatggcccctgccaatgttatgccgtacagaccgagatgagccggcccgctcagcgtgaccgccagcaccacattcaccgcacctaacagcagggtaacaatcgccggtgttttttgttgattaaaagcggtccatatataaaacagcggcataaaggcgaggctgacaaccaagtatccggcatgaataaataaaagcggtgctatcgttgaaaaggacggtccgagccagattgtcagaaaaggtcccgccaatccgcccaataaggcagcaggaagtgcaagcaaaagaccattgagccttactgccttattggcgtaattcatcaatccttccatatcgccttttgaataatatgaagtcatgatgggcgcaaacagggatgcgaccgttccggccaagctgcgcaaaagcagcggaaactggataatcgccgcgtatttcccggatgcagacgcccccagcatcaaattggcggttaacagatcaatctgcaaaaaaagcaggacgccgatttgattgacggagctccatgcgcccgcttgaaacagctccttgcttgtacggaatgaaagatccttcatacgaaacgaaaaccacggaatcagctttttgaagaaatagaaagacagcacagacgcaataacagcaccagctaaagctgcaagctggatctgccagattttcggcgcaaagcatgcaaacaggagcagcacagacagcacccgtataagcatttgcaccgcctgaatggaactggtgatataaaggcggttggcataaaatggtgcagcgccgaagcccgccatcagaaacgttaaaataaacagcacactgccgattaaaatcgacaaacgcacatctgccaaaagcgcttgcggcacattcatgacgcggtcaataaaaaaagccgaacccgcaagcggcagcaagagcagcaaggaaatcaaaacagaggcggctaaataattgctgatatacgcatttgctttctcccgctctcccctgtgggcagcaacagaaaagaaccgaacgacaaccgagctgagcgccacggtaataaccgaaaagtaattaatcacattttgtgtcaagtgaacaaagccaaacgcttcgacaccgagcgttttgacaataaaaggcgtcatccaaaccgataggaaaacagacaagagaaaagccgtgagattcgcgctgaaatttatcgtgaatttcatgcctgcttcgcactgcctttcattgtcccccgctgctcgaaaaacagcttgatgagaaaagtgagccgccatttacacagtgctaataccaaacgctctcctcttaataatttctcatgctgaaacggtgtatgtctgacagcctgccgcaccatgtcataggataaaatctgtctgatcttctttttgatgtctttcggcgaattcggagaagcacaggcatttgccaaaagcatcggaagctggtgcctgcaaatgtacacattcaaatcttctttacatgcgcctgctaagccgtagtgattgtagaatgcgattttagcctgatattgtttttgaagatgttcatccatcgccggcttataagggatttctgtcaggctgttcgggttttcacgataaatgtacaatccttcatcaagcattttcacccgctccgcttcgcgaaaagcggacaaattaaagggagagtcttcagcaaaacggatgtcttcatcaaacagcagattcgccctttcaaaaagctcacgacggtaaagataacgccatacataccagataaatctcgtttcgtgagcatgtttaagctgttcagtcatttctggtttcgtcagcacgcggtttgcctcaagctgcggcggcacatatgtccgcctgtccgatgactgcttgtaaaaaccgcatccgacgatgtcaagctgattttgctccgcttcttcagtcagcctctggaacatggcggatgatacataatcgtctccgtctacaaagccgatgtaagtgccccgcgcggcctttattcccgtatttcgcgctgaactaagcccgccgtttgcctgatgaatgacccggattctcgcatcccgttttgcatagtcctctgcaatttcgcctgaacgatccggtgttccgtcattcacgaggatgatttcaatatcagaaagcgtttgacgaagcaaagaatcaatgcactcttctataaatggttcaacattatacatcgggacaataatgctgacgagcgggatcattgcgcttcaccgctgattttgtcacgcagacctttaaaatacacatctctcggaaagcctgcacgggatgtttcttttgttaaaagctcattgactgcggctgttacgcgctctggctccggatgttctatcagcttcatgaacgggatgtctttaagccattgatagccctccatcaccttatggtcaaaggagcgaatgacaacacacggcgttcctgtcagcgcgcaaaaaatcatgccatgaagcctgtcagtgacgacggcttctgcgctttgcagcttagaccacagtgcttcaagttcatgttcgcgtgtatcgcggctgacccggcggccgatcgttgtcgtaaaggatttgatctcgccgaattcctcacatagcgcagccttgacccggttcctctgctcctcctgaagcacgctttcctgatcctcgcgcaaacacatataaaccccttcgcgttctgcgggagccttgcttctgtctaaatacagcaccatgtccggctgcttcaaaattgttttttcttgaaaatgctgtttcataaattgatacgttgtttcatcccgcgccatcagcaataggccggggtgcgcattataaattttctgtgcccgtttcagctctttgcgcccttttttcgtgtcagaaaaatgagccgttgccggaagctggacaacccgatagtcatggaatgttttaatgatgaagcggcgcgtccactcctcataacggtataaatcccccatgtttccgccgccgatgataaagaccatatcctccggatggcgcgagcggatcaggctttttgctgatttgtaaatgtccttcatatcgacctcgacgatgtcaaagtccgggtattcttgctcaagaaatgccttgctggcataagcaattgcgtgatctcccaaattgtcatgggacggcagcagggtcagtatgatttttttctgatgtgctgcggcctttaccggttgatctgccgctcccagccaatattgggacgggtatttgacctttagcagcagccattctgcaaaattgattttcaacgattgtaacgacatgtcctcaccctctgtttctcattttgtactcgatcacccgctgatacacagccgatgccatagcgacgaacggaatcattctgtatttcgccatcagaagcaggcatgaccgttttgcgtcaaaaggagcagtacccgtttttgaaagactttcttgaaacaccgggtccgcgcatatcacgccaacatttctaagcttttcaaacagccggcggctgccgctcgttttccattcattcagcatacagatgctgctgtgaagaacgataaaggtatcaagctccttgcgatactcctccagtttgttgttctcctgtaaaaacgccgcattcgtctcatacagcgcaagtcctgattcaaacaattttttctgatagcgctgcacaatggaggaaaggtgaattcgataatgatagagcggcgtttttacgtaggatactgagcgggcgaaaaaatgagccctgaagctgaaaaactgatcctcgacatgctccagctcgcctcggagcggaaacgacagccgatgggcttcaatcatgcttcttctgtacagtttgttccatgaaaaccctctgaccttcccttcgaataacgccttgatatagtgctccttcggctgatcctgataggtttgggcaatgtcagagtccatggttttgccagtgtcctcaaactctgcggcgtaattgcaaatgaccagatcagtttcatcgcctgctgtccggagcatctgctcgcaataatcaggctcaatccaatcgtctgaatcgataaacgcgataaattcgccgcgtgcagcttcaatgcctttattccgaaccgcaccgagtccctggttttcctgatgaatcaccttgaacctgttgtccattttggcgtattcttctgcgatatccgggctggcgtcagctgaaccgtcattgacaatgatgatttcaatattgtccattgtctggttccgcagtgattcgagacacgttctgatatatgtttctgtgttataaacagcgactaacagactaaccgcaggtgtttccataatgaccggctcctcgtgcataaattaccgggaaaaaatcgttctgtaaggcagaaccgatgaatcgaccggcataagcaaataactgtaaagaaaataacaaacaacgatagcgatatagataagagcgttcgatttttcatcaaatatcctgacgaaataagggactaggatcatttgatacagaccgaaataaatattgaatctggcaaaaatcacgtcctttgtggccaaaaggccgaacaaaaaacctagcaggcacaaattgacgacaatatcaatttgcggccacagactccgcagtcgttctttatagcaaaatgcaaggaacagcggcagaaccaaaacagcgattttgatcacattcattccatttgtgttcgtcatgagccatttttcataatggctgtatgagctgttttcaagtacaacgacaaacacagaaataaatttttgatataaaaatgtcatgccgagaaataaagcggataggccgaatatcgccggtgaccaggcttttcttctgacaataaagtacactggaatcataatcagcgccgacgaatgaaagagcgagctgaccagcacaatcaggaaatatcgcttccagttcccgctaatgatataacggatcgcccaaaacaaaacagctgccaccatgtattgcctgatgccgttaaaagatgcgtaataatgaaaggttcccaaaaataaaaagacactcagctcaaacggcctgccatagtcggcgagtgtcttcataataaagctgtaggtcacgaccgccaccgtaaaatacatgatttgaggatcttccgtgatgaaattcatcagccaaaggagtgcggtaaaccccggatctgtcgctgttttcgctgtgccgaaaccgaatatctgccacacattttgataatcgcccgccaattcgtacaacagcgtgtacgtctgaaaatccgtgccgactcgatagcggagacctgacacgagcacaagtgaagcgagcggaatccagatcaaaagcttattcggccgataccccgtggcaagcgaatcatcacggccgccgcacattttagcgaaccaagaccaaataaatacaatccccatattgacggcatatacaatcatcggttatggtccttttccgtgctgatgttgtatacattcagcagcgctcctacattttgctgtgcatcgtagccaagttgagcgagtgtttctttgatgaactcacgcttcggcctgcctgcggcggccgcccttgcaatggtttcagcccagacgctgatcggctcagaaagacttaatcttgtgacaagcccgagaccggcgtcgactttttctgtaatgctgtctgaaatgatgcatggaagccccgacgcctgcgcttccacaagcacaaccggcaagccttcgtacagagacggcatgacaaatacatcgaatgttcgcatcagttcatggatccgttcttccgtgcctaaaaagaggacgtctgatagcaaattctgctgccgcgcctcctcctctatctccccgcacaacggcccgtctcccgccagaacgagctgaaagcgaatgcctctttccttgagatgtgcggcaagcttcaacaggaacgcgtggtttttcacttcatgaaaccgggccacatggccaatgatgagccggtcggctgcaatgccgcgtgctgctttttcttcatcagccgcctgcccatttggggcgaacaactcaaggtcaatcccgttaggaagaaggtgaacacgctcccgctccatattggactgtccaaataaaaacctgcccgcatcctctccgcaggcacacagcgctgtcgcatttgccaaaatgagccgcctgaacacgagcagctgcaatcgatccttccagttgaagccggtcttccaagacgtattgtgggagtggcataccctgaccggcactccggcgagccttgccgcaagggcgataaaacccgtttggaaatccgtgtgcgcatgaacggcgctgaacggcccattttcttttatcgcgtttctcacattcctcacaaatgtaaggggattgctttgcccaatgctcgggacataaaaaagccgcccgcctaaagataaaatctcttcatcataagcgcacggatcatttcgatacgttaaaaaatcaaattgcactttgcttttgtccatcttccgatataaattcattaccatggtttccgcgccgcccctgttcatgccgctgagaacatggagcacgcgcttttggctgctattcatgcttgacaagcccttccttttggttcatcactctttttttatggtagcgattcatcacagctgcaggcataaaggcgcgaattaacggttttgcgatatatatgtaatcagataaaggaagcttcaagcgtctgcacgcctgatagacaagaatggcattgtcgattgaatacgtaaatgaccgccgtttgaatgcatcgctgtcttccctcactttatacaaggcttcctgaagattatagcccctgaagccctcttcaaaaaagcgaagccacaaatcaatatcttccattcgtctcgtccgccgcaccgaccggtagcctttcagcgtgcggtaggcactcgctctcatcataatcgtgccgtggcaaaatggagtcccttttgccatgatgcccggctccggaacagaaggcagaatgcgggcgcctcttacgccaaattcatcaaacacaagcatgccggtgccaaccacctgatagtgtcggtgcttttctaaaaacgcgacctgcttttccagacggcgcggaaacgaaaggtcatctccgtcctgacgtgcgatataatcgcctgtcgcatgcgaaagacaatgatttaatgatgcggcaagccgcttatttgttttgttttgaatcagtttgatgcggtcgctgtaatgagcggcatactgcttcgcgatacggagcgtgccgtctgttgacgcatcatcgcacaaaatcagctcccaatttttataggattggctgagtatggattctatgctttctgccaaagtgcgttcgcaattataaatgcccataatgacagaaactttcggtcctgagttcatacgcttttctcctttgtatccatatccatgtacgcggaataaatatctgccatttcttccaccgttcgcgcctccgagaagcgcaaggctgtttttcggccttcctgtcccagctttcggcagagctccggcttatggtaaagctgttcaatccggcgggcaaaagcagcactgtcaccgattttgatcagaaaaccgttttctccgtcgcggatgatttcccgatgcccgcgattatctgtggcgatcgccggttgttctgccgccattccctcaagcacattcataccgaggccttctctaatgctggatgcgacagatacatccgcaagctgaatcaactcatgtatgtcgctgcaaaagccgtaaaaacagacatgggcggaggcaccaagcttttcagctaacgtttgatacgtatgttccattgccccttccccggcaaacacaaggcggagtgagggaattttttcttttagcaaggctgcggcttcaattaactgcttctggtttttgttcagattgagctcagccggataaaccaatataaaatcatcttcacggaacccgtgcttttctctgagtctttgctgctctatcggactgacaggccggaaacgctcggtattgacgccaatgccgtgaattttctgcgtccttccgcccggcctttgaagtcctttcgcccgtatgtaatcctcttcattaatcgtaatcaggcagtctgtatatgctgaaagccatttctcaaccggatagtaaagaagccaatttttcatcggtgcccctttgcagaagtgaaatccgtgcgctgtgtacagcacctttgttccgtgccgccgtgcctgcctcgccgccagtctggcgagaacgccgccgaccggtgtatggcaatggacaatgtcgtattcataagtgtcaatcactttcttcagctgcctataaacggccaggttctgagggtcaaaaggtgacctgcgaatcgggatggagaatttctcatccacatacggcagcttggtttgtccgttcgcggcgacatgaacctcccagcccatttgcttgaaccatttaaaataagggaggtgaaaggccttaaaatgataatcaacagtcgcgcaaaacaatatctttttcgtcattttcactccccctaatgaacgctggcagccgtcatttcttctgatgtattgattgccgcaaacagcctcgctctcaggtcggcttccggcagctcatgaaaatcctcgataaagcgcatcagcaccggccaatcgccgtccaccgctttaccgatgtgaatttttggaaagatttgttcagcatggacttcatttttgttcagcaattcttcatacattttttcgcccggacgaatgcctgtgaattcgattggaacctgctcagtcgtgtagccggacaaatgaatgaggtttttggcaagatccacaatctttacgggctctcccatatcgagaacgaaaatttgacgccctttcgccagtgccccagcctgaatcacaagccttgatgcctcgggaatcgtcatgaaatagcgggtcattgccggatgtgttactgtcaccgggccgcctttttcaatctgttttttgaaaattggaatgacgctgccgcggctcccgagtacattgccgaagcgaacagcaacaaatttggttctgctgactttcccaagattcataataatcatctctgcgaatcgttttgtcgcccccattacgttggctgggttcaccgctttgtccgatgaaatcagcacgaatgtctcagttcccgacatatcggctgcttccgcgacattttttgttccgataatattgtttttgaccgcctcttctggattgtgttccattaaaggcacatgcttatgggcagctgcatgatagacaacatgcggctcgtattttttcatcaaggtaaacattttatcgcggtcctgcacatcagcgatttccgtatggaacacaatgtgtttgccgaatcgtccgttcagctctgtataaatcgaatgaatgctgttttccccatggccgagcagaatgatttccttaggctgaaacgcgctgatctgacggcagatttccgagccgattgatccgcccgctcccgtgacgagaactgtttttcctttgatgcggttcgaaatttcgctagtgtcgagggttaccggctttctgccgagcaagtcctcagcttttacatctctgatttgtccggcagttcgtgtgccaagcagcatttcatcaaaatgaggcataattttaatgcttactccggttcgcacacattctttatataacacctgaagctcatgggtgcggagtgaaggaatggcaataataatataattaattttgagcttttgcaccgcaggcatgatactttcttttccgccgattacgggcagccccataatttctaatttatgcttcgtttggtcgtcatcaataaaagcgacaggtatgatatcaggttcatctttcgaaagcagctgcctgaccatcagagtcccacctgagcccgccccgataatcagcgcgcgggacgaggcgcagcgttttttcctgatgctttcgtttaatactctggataaaatacgggtccctccaatagacaaaagctgaagcacccagcacgcggttaacagacggaagaacatcgtgtgatacacagcatactgaatgacgccggtcacagcggctgaaagcgtaatgcccttaagcaggacaatcagctcgccaagcccggtgtatgtccacacctgtttatactgattgaacaggaaagcacacacatgatagctgaggagcaagctgacagcggtaagcagtaatgctccggagtcataaaattgataggaatcttttaaaaattgatatcctgcaataactgaatttaaaacgaggtaagtatccagcgcaataatcattgacagtcttctccggtaactcaaccttttcccccctaattcttttatcggtttagctgcggcggttttcgtctctccaaaaaatcggcagcagctaaaccgacaatacgtcctatgtatatatgagataagtgggcatttaacccatcctcacgccccgccagcgacgaccagcatctaaggcagcaacttcagctgcccacagcagagccgagtgcctccattgatacaggtcaggagacatcacctttacaaaaactagtaggaatagtgttccgattttttcattttctttttgtttaaaagagcgcctaacagcttcgcattggattgttccagtgcatcttttgctttcagaacggtatcggtttttgtttttccgcttaaaacgacgagcacgctgccgtctgtctgatttgctagaatctgagcatctgcaacagccaaaagaggaggggaatcaaagatgacgaggctgaattgttcatagatctcagatattaaatctcccattgcttttgaagacaacagttctgccgggtttggcggggtcggcccgcttgtcagtacatataagttatcgatcggcgtcttttgcaccgtctcactgagtgaagcattgccgaccagcacatttgtcagcccggttacattatcaacctgaaacgtctgattgatggtcggctttcttaaatcggcatccaccagcagtactttcttttcctgctgctgcgcaaagacagccgcaagattcgctgcactgaacgatttaccttcaccaggcacagaggaggtgacgaggatagatcgcaagttggtctggacagatgagaactcaatgtttgtccgaatggtgcgatattgttccgcaacaactgatttattgtgtaaaacagatatttgagccaaacctcgccttgctttcttttttctaaagatcactcgcttcactccccgaaatgttttatcccgcgattccgccctttgtggacatcaggaacggagcctaagcatggcaatccggttctctcgctgagctgccgtgcgcttttgcatgtatcatcgagaaaatgcagaaaaaatgccagtgtaatgccgcccatgacagcagcgccaaaagccatgaccatatttcgcagcctggccggcttgatcatcgggctttccgaagccttcgcctctgataatatatgtacgccttgtacattcattctttcatctacttctttttcaaacttgttcactaacgtgttcgcaatctcagctgctttcgccggatcgtgatcctgaacggcaacgttgattatttctgattcattttcactgctggtaaccacttttcctttcagcgaggaagccgattcagataggtgcaattccgccttaacttcttccatcaaggcagtgcttttcataatcgattggaacgtgctgctatactgaagatttcgctggatgtcactgagattcgagttttcttcaccgtctgattcatgaaccagcacctgtgtcgacgcctggtaggtcggtgaaatgaccttaaattgcacaaaacccataataagggtgacgccgattgtgatgagcagaatcagcacgaatctgtgtctgacaatcgcatataattctttgaaactcatattctcattcatgtattcatagccttcagccttcccgcggctggcttcccgcgcccctttctgttaatgattggattataaaagaaaacgttattatttaaaaattgcaaaataagccaataagttctctttagagaacaaaatcatgattttcctctaatttactgcacttcccttattattttaaattttataaagaacgaaaaattccttataatgaacgaaataacgacaggaatagaggagaatttcatattatgattggaagaattatccgtttgtaccgtaaaagaaaaggctattctattaatcagctggctgttgagtcaggcgtatccaaatcctatttaagcaagattgaaagaggcgttcacacgaatccgtccgttcaatttttaaaaaaagtttctgccacactggaagttgaattaacagaattatttgacgcagaaacaatgatgtatgaaaaaatcagcggcggtgaagaagaatggcgcgtacatttagtgcaagccgtacaagccgggatggaaaaggaagaattgttcacttttacgaacagactcaagaaagaacagcctgaaactgcctcttaccgcaaccgcaaactgacggaatccaatatagaagaatggaaagcgctgatggcggaggcaagagaaatcggcttgtctgtccatgaagtcaaatcctttttaaaaacaaagggaagatgatgatcggttaaagggctaacgttcgcatctataggggaaatctgtttataatgggggaaaaagggagagaacacaatgactcatcaaatagtaacgactcaatacggcaaagtaaaaggcacaacggaaaacggcgtacataagtggaaaggcatcccctatgccaagccgcctgtcggacaatggcgttttaaagcacctgagccgcctgaagtgtgggaagatgtgcttgatgccacagcgtacggctctatttgcccgcagccgtctgatttgctgtcactttcgtatactgagctgccccgccagtccgaggattgcttgtatgtcaatgtatttgcgcctgacaccccaagtaaaaatcttcctgtcatggtgtggattcacggaggcgctttttatctaggagcgggcagtgagccattgtatgacggatcaaaacttgcggcacagggagaagtcattgtcgttacattgaactatcggctggggccgtttggctttttgcacttgtcttcatttaatgaggcgtattctgataaccttgggcttttagaccaagccgccgcgctgaaatgggtgcgagagaatatttcagcgtttggcggtgatcccgataacgtaacagtatttggagaatccgccggcgggatgagcattgccgcgctgcttgctatgcctgcggcaaaaggcctgttccagaaagcaatcatggaaagcggcgcttctcgaacgatgacgaaagaacaagcggcgagcacctcggcagcctttttacaggtccttgggattaacgagggccaactggataaattgcatacggtttctgcggaagatttgctaaaagcggctgatcagcttcggattgcagaaaaagaaaatatctttcagctgttcttccagcccgcccttgatccgaaaacgctgcctgaagaaccagaaaaagcgatcgcagaaggggctgcttccggtattccgctattaattggaacaacccgtgatgaaggatatttatttttcaccccggattcagacgttcattctcaggaaacgcttgatgcagcgctcgagtatttactagggaagccgctggcagagaaagttgccgatttgtatccgcgttctctggaaagccaaattcatatgatgactgatttattattttggcgccctgccgtcgcctatgcatccgcacagtctcattacgcccctgtctggatgtacaggttcgattggcacccgaagaagccgccgtacaataaagcgtttcacgcattagagcttccttttgtctttggaaatctggacggattggaacgaatggcaaaagcggagattacggatgaggtgaaacagctttctcacacgatacaatcagcgtggatcacgttcgccaaaacaggaaacccaagcaccgaagctgtgaattggcctgcgtatcatgaagaaacgagagagacgctgattttagactcagagattacgatcgaaaacgatcccgaatctgaaaaaaggcagaagctattcccttcaaaaggagaataaatatggggaaaacaggatacattggtgctgccattgttgtggcagcttgtatcattattttgtcggccgtggtatgtttacgggacacagtctattaccagcctatgcgctggactggcatcatactgtttttcgcgggaattgtgatggttcccgcatactcagcaaaaagaaaacccggaaaagagaagtaattctcttttccgggtttttatgtttattataatcttcccgcgcgaatatcgtctgtcattccctcataaggagccttcgaaatcacttcttcgttgtcgactccttcatttttcagaaatgtaatttccgcaaattcaggtacaacgtattttggatacgtttcatatttttcgcgggattctttcatcaaatcaatgtggtcattttggtagcaaaccgtaatttcaggatgttcatgcacccatttcgggaagaaaataatgccatgcatgcgtttttcatttggcataaagtttaatgaaacatccgtgccagtcggctctgtccaagacactttatatacgccttctgtcagtttgacaatattcacttcctgatctcgaacccagcgtccggcaaccattccgctatgaattctataatcaattgtatggtcgtttttaatataaatctcgtattcccatccgttttcatacgtataaatcatgtggcttccgataaagttttccatcttacacactctccttagtcttttactgtacttcataaatgtctagtagaacgtaatcaggggttctttctgcggaaccgataaacaagcggtcatggagccattgatagacttcactgcctgtttcaaacgtcggtaccgtacgaaaataaacatgctccggttcaataatttccccggctgccgcttgttttcgaaacggcttgctgacttgccgtattccattgttttcaatgtaaatcagttcatgatctgctgtttcaatcacatacctggcagataaatctgttctgccgttagcgcgaatcatttgtgaatcggcaccgcccggcaaaatacgtccctttacttccccggttattgttcccgaacgaatcggaatgaatcatctcagtcccaggcttgtctcaccaatcgtgataggcggatcaaccttgatttctaaagaggcgaatggttttaaaaccggcttcttcacgagaaccacctcaccttcagaaaaaatcatgtaactatttacatgttcactttaacaccattgcagttaactgtcaaacaataggaacataaaaaaacaaggactgtttgaagacagtccttgtctgaagctagctttgataagcaagatatgtgctgacagtgcttttggcaagacaggcagaggaatctataatcggaatctcactttgaatatgatctaacaccgcatttaaatccgtgcaggctgaaatgatgatgtctgcatgctgactgatttcttcatatagcgtctgccacaatgcttgtgtatgctgcatatgatttggctgtttgattgcggcgataagctggttcacagcctgctgccaatggtccttgtgaataacttcttgtccatttcccttcagaactttttggtagatggcggattggatggttggctctgttcctaaaaccaccgctttttttgcgggatgcggaatctcttttatcgtttcctcaacaatatgcaacataggaactgacaatgcctgctgaatctcttcatagtagacatgcgccgtattacaaggcagcgcaatgaaatccacgcctgttttctcgagctttaccgctccgtcgataatcgcttttttcatctcgtcatggtcaattggacgatctgcatagaagggcgtcgggcatgaatagatcatcatgtgcggatagtcaatatcgtttgaagccccatacagcttctgacagtaatcaatcaccttatcaataaacggcgaggtcgatttcggccccattccggctaatattccgatcatcaaattcattcctttctacttcgtacggaccgcttcttcctctgagccatcctcatagaggataaagcttttcgcagcatcctcacctaatgtaaactcgacttcaacagacaatgctcgcagaaagaaacgggtttccgaggaaggaaataactccagtctcagctgtccggcgatctccaaataaagccgttcattctcggttgtcacctgtgcagccgtcccatcctgcaacaggtagctgccaacatagcggctgtatatcgccgtatcaattgcttttttctttttatcagcaggacgttccgggacatcatatggctggccaaatagaatatgttccgccgccttcagaatcgcttgttcatattcagtatcctcttccttattactcaaatagatcagcgttttacgatgatcgatatatcggatcatcatcgtcgaatagccgggccatcctccgctgtggctgacaatccgccctttttcaggactgttttgcagcacccagccaaagccataatcaattgtttctccattgttgaggcgcactggagaaaacgcagattccttagaagccttgctgatgaaatcgtcctgatataaagcctgatcaaatcgaaacaaatcgcttgtgacagagttaaccgtcccatctccctgtatgccatcgagatacacaacatagttcgtttcctccagctcatcagggaggacgtatgtttcggaatgtacatcatacacatatccatatgcataatgatcaattcgctcaggcgaaagcctcctgttatacactcttgtttcattcatgcctgccggtaaaaaaatacttgtttttataaaatccgcatagctcatgccagatgctttttcaatgataaccgccagcagcacataccccgtattgctgtacatccagccttcattcggttcaaaataaccagatagcccctcattcatcagcatatcgacaatatcctgattcaccgcaatcttgtgtgaatcccaattggcaaaaaaccatcccatataatcaggaagccctgacgtatggttcaataaatgccgaatcgttacgccctgatacggaaaaccgggcagccagcgatccactttatcctcatagccaagaatccccttctcctccagcaagatgattcccaatgctgtaaaaggctttgacaaagacgctaactcaaacaaagagttggttttcaacgggcgtttttccgtcatttccgcatagccaaaagagtggtgatataaaatatcgccaccctccgcagccagaaccgtcccgttaaactgatgtttttcgcctaatgtctcaaataacgtctgaagatgctttcttttattctgcttcattcctccacctcccatatctctgtacgttactaacctactaacgtttcaaatattttgaaaaatccttcagttagagatcctttttaacccatcacatatacctgccgttcactattatttagtgaaatgagatattatgatattttctgaattgtgattaaaaaggcaactttatgcccatgcaacagaaactataaaaaatacagagaatgaaaagaaacagatagattttttagttctttaggcccgtagtctgcaaatccttttatgattttctatcaaacaaaagaggaaaatagaccagttgcaatccaaacgagagtctaatagaatgaggtcgaaaagtaaatcgcgcgggtttgttactgataaagcaggcaagacctaaaatgtgtaaagggcaaagtgtatactttggcgtcaccccttacatattttaggtctttttttattgtgcgtaactaacttgccatcttcaaacaggagggctggaagaagcagaccgctaacacagtacataaaaaaggagacatgaacgatgaacatcaaaaagtttgcaaaacaagcaacagtattaacctttactaccgcactgctggcaggaggcgcaactcaagcgtttgcgaaagaaacgaaccaaaagccatataaggaaacatacggcatttcccatattacacgccatgatatgctgcaaatccctgaacagcaaaaaaatgaaaaatatcaagttcctgaattcgattcgtccacaattaaaaatatctcttctgcaaaaggcctggacgtttgggacagctggccattacaaaacgctgacggcactgtcgcaaactatcacggctaccacatcgtctttgcattagccggagatcctaaaaatgcggatgacacatcgatttacatgttctatcaaaaagtcggcgaaacttctattgacagctggaaaaacgctggccgcgtctttaaagacagcgacaaattcgatgcaaatgattctatcctaaaagaccaaacacaagaatggtcaggttcagccacatttacatctgacggaaaaatccgtttattctacactgatttctccggtaaacattacggcaaacaaacactgacaactgcacaagttaacgtatcagcatcagacagctctttgaacatcaacggtgtagaggattataaatcaatctttgacggtgacggaaaaacgtatcaaaatgtacagcagttcatcgatgaaggcaactacagctcaggcgacaaccatacgctgagagatcctcactacgtagaagataaaggccacaaatacttagtatttgaagcaaacactggaactgaagatggctaccaaggcgaagaatctttatttaacaaagcatactatggcaaaagcacatcattcttccgtcaagaaagtcaaaaacttctgcaaagcgataaaaaacgcacggctgagttagcaaacggcgctctcggtatgattgagctaaacgatgattacacactgaaaaaagtgatgaaaccgctgattgcatctaacacagtaacagatgaaattgaacgcgcgaacgtctttaaaatgaacggcaaatggtacctgttcactgactcccgcggatcaaaaatgacgattgacggcattacgtctaacgatatttacatgcttggttatgtttctaattctttaactggcccatacaagccgctgaacaaaactggccttgtgttaaaaatggatcttgatcctaacgatgtaacctttacttactcacacttcgctgtacctcaagcgaaaggaaacaatgtcgtgattacaagctatatgacaaacagaggattctacgcagacaaacaatcaacgtttgcgccaagcttcctgctgaacatcaaaggcaagaaaacatctgttgtcaaagacagcatccttgaacaaggacaattaacagttaacaaataaaaacgcaaaagaaaatgccgatatcctattggcattttcttttatttcttatcaacataaaggtgaatcccatatgaactatataaaagcaggcaaatggctaaccgtattcctaacctttttaggaatattgctgtttatcgacttatttccaaaagaagaacatgaccaaaaaacaaaatcaaaacagaagccggactaccgggcggcatatcattttacgacgccggataaatggaaaaatgaccctcaaaaaccgatctattttgatggcaagtatcattatttctatctatataaccgggattacccaaaaggcaacggcacagaatggcgccatgccgtctcagaggatttggtgcactggaccgatgaaggcgtggcgattccgaaatatacaaacccggacggtgatatttggaccggttccgtcgtggtggataaagagaacacagccggcttcgggaaaaatgcgcttgtcgcgattgtgacacagccctcagccaaagacaaaaaacaggaacaatatttgtggtacagcacagataagggaaaatcattcaaattctacagtggcaaccccgttatgcctaatccgggcacagacgatttcagagatccgaaagtcatatgggatgaccaagataacaaatgggtcatggtcatggctgaaggatcaaaaatcggcttttatgaatccgataatcttaaggactggcattacacaagcggattcttcccagaacaggcgggaatggtggaatgtcccgacctctacatgatgcgggcaagcgacggaacgaataagtgggttctcggtgccagcgcgaatggcaaaccgtggggcaaaccaaatacgtacgcctactggaccggaagcttcgacggaaaagaattcaaagcggatcagactgaagcccaatggcttgactatggcttcgactggtatggcggtgtgacgttcgaagacagcaaaagcacagatccattagaaaagcggtatgcgcttgcctggatgaacaattgggattatgccaacaacaccccgacaatgaagaacggctttaacggcacagattctgtcatacgcgaactccggctgaaggagcaggatggaacatacagcctcgtctcacagccgattgaagctttggagcagctgactgtttcaactgacgaaatagaggatcaggatgtgaacggatcaaaaacattgtcgataacaggtgatacgtaccagcttgatacggatctttcttggtcagagctaaagaatgcaggcgtcaggctcagagaatcagaagaccaaaaacgccatattgatgtcggcattttcgctgaaggcggctatgcttatgtcaatagagcagccacaaatcagcctgacaaaagcaatacctatgtcgaaagcaaagctccttatgatgtaaacaaacgtaaggtgcatttgaaaatacttgtcgataaaacaacgatagaagtatttgttggcgacgggaaaaccgttttttcaaatgaagtcttcccaaagcctgaagataaaggaattaccctttattctgacggcggcacagcctccttcaaaaatataacagtgaaacactttgattcgattcatgaataaaaacaggggcggcgcaggctgcccctgtttttttattaggagcggtattctctgttacatattgggcattgtaaggaatataaggctggtttcaaaggaggaagcgaatgtctaaacaaggaaattttcaaaaatcaatgtcgctgtttgatctgattttgattgggatgggagccatctttggatcagcgtggctgttcgctgtcagtaatgtcgcttcaaaagcagggccctccggcgctttttcctggatcctcggaggagccattattttgttaatcgggcttgtatatgcggagctcggagccgctctgccccgtaccggaggcatcattcgataccccgtttattcacatggccaccttgtcggctacttaatttcgtttgtcacgattgtcgcttatacaagcttgatttcaattgaagtgacagctgtgcgccagtatgtggcctattggtttcccggcctgaccattaaagggtctgattcgcctaccatttccggctggatcttgcagtttgccctattatgcttgtttttcctgctgaattattggagcgtcaaaaccttcgctaaggcgaatttcatcatatcgatttttaaatatattgtgccgattaccatcattattgtgctgatctttcattttcagccggagaatttatccgttcaaggatttgcaccgtttggatttacaggtattcaggctgccatctcgacaggcggcgtcatgtttgcgtatctcggcctgcatccgattgtatctgtagcaggtgaagtccaaaatccaaaacgcaatatcccgatcgctttaatcatttgcatcatcgtttcaaccatcatttatactgttttgcaggtcacctttattggtgcaatcccgacagaaacactgaaacatggctggccggcaattggccgggagttctcattgccgtttaaggatattgcggtcatgctcgggttaggctggcttgcaacgcttgtcattttagacgccattctgtctcccggaggaaacgggaatatctttatgaatacgacatcccgccttgtttacgcctgggcgcgtaacggcacattatttggcatattctcaaaggtcaataaagatacggggacaccccgcgcttcgctttggctttcgtttgccctgtccattttctggacacttccctttccttcgtggaacgcgctcgtcaatgtctgttcagtcgcgctcattctttcatatgcgattgcacccatttcttcagctgcgctgagggtcaacgcgaaggacttaaacaggccgttttatttaaagggaatgagcattatcgggccgctttcctttatatttacagcgtttatcgtgtactggtcaggatggaaaacagtctcctggctgctcggttcacaactcgtgatgtttttgatctatctctgtttcagcaaatatacgcctaaagaagatgtcagccttgctcagcagctgaaatcagcctggtggcttatcgggttttatattatgatgctgatcttttcctacatcggttctttcggacatggtttagggattatcagcaatcccgtcgacctcattttagtcgcgatcggctcacttgcgatttattactgggcaaagtataccgggctcccaaaagccgccattgattatgataaataaagaagcaagaggttttcttgcttctttattctttacaaacaaacatacacgcgataaaatgaatgagagtcagtcattactggaggtgttcctcatgccaaaacaaacatcgggtaaatacgaaaaaatattgcaggcggccatagaagtcatttctgaaaaaggcctcgacaaagcttctatttctgatattgtcaaaaaggccggcactgcccaaggaacattctatttgtatttttcatctaaaaatgccctcataccggccattgcagaaaatctcctcacccatacacttgatcaaatcaaaggtaggctccatggggacgaggatttttggaccgttttagatatattaattgatgagacatttctcattacagaacgccataaggatattattgtcctctgttattccgggcttgcgatcgaccactccatggaaaaatgggagacgatctatcagccttattattcctggcttgaaaaaatcatcaacaaggccattgcaaaccatgaggtaacggaaggaatcaattcaaaatggacggccagaacgattatcaacttggtcgagaatactgcggaacgattctatatcggatttgaacaagatgaaaatgttgaagtgtataaaaaggaaattttcactttcttaaaacggagcttaggtactgcttaaaaaatgactgggtaacaccgctcattttttaatgccctaaaaatgactgacgttcattcataaaatagagaggtgtttcatttgaattgggttcttgtttttattgcagggcttttagaggttgtttgggcctcttccctcaaacatgccgattcgcttttggattggatcatcatttttatcttaatcgcggtcagctttatcctgttgatccgctcttatcaaaaaatcccgatggccgcggcgtacactgtgtttgtgggaatcggaaccgtcggaacatatctgactggaattgttctgggcgaatccttctcagcagcccaaatgttctttttagctttattgctggctggcattttaggaatgaaattatttacgaaagaaagcaaatctcagccgggaggtgaaaaataatggcatggtttttattagtgattgccggcatagaagaaattatagctgccattgccatgaaatatatagacggaacaagaaaaaaatggccgatcattgtgatgactgttggattcggcttatccttttactgcctgtcccaagcgatgatcgtcctgcctgccggagtcgcatatgccgtctggactggcattggaagcattggtgtttcggcggtcgggctcatctggtttaaggagcggtttcagctttcacaggtgatttcactttgccttatcctagccggcgtcatcggcctgcgtcttacgtcatcttcataaaatcaaggcatatacagctgtatatgcctttgccattaagcttcgtgatgtttttgaagatgaagcggcggcgggatgagccagcctttgttttttagcagccttaagtattttgcgccggttgccgctttcgacatatgaaattgcccaaacatcatggcaatatcctcacgaatcgattgccccatcattttgctgcatgtcacaagacctgcagcattttctgctgccgcggaagccgccacatccggatcgagaaaccgtgcaccaggcggaatatcgttaagatctgctgtcggcggttcaggagaagccggcggcagcgccaccccgttttctttcaggatcgtgctgacctgtttgatttcatcttggcatttctcaatagactcacgaagcagcttcttcaggtcgtcatcaccgacatgattcaatagcatttggtaattgccgaccattttattgcccgccatcacataactccacaagccgaatacctcaccgtaatgcatcggttcatcctgcggatttccgcttaaaatacccatgctcattctcctcccatattcaatattgcacatttcataacgtgcccaagcggaggaacatttatgtttcagcggaaaagatttatgaaatgaaacaaaacaaaaaagacaagagtggcaagttgccaaaccattgtctttcctgttgtttgattggacgcactgaagggattcgcaccccgacagacaagataccggaaaccattcaagtgctttttagtatgagtcattgattctgtctttaataaactttaacgagatggcgggatgctttgcggaaaacgaaatacattttcggggtcatatttcgcctttatttctcgaagccgcgcaaagtttgcgccataatattcttttccgaagttttcaatgttttgatctggaacattaacatatgaacctgctacatatggttgcatcagctgacgcactctttcaactgatgcaagatttgaatcttcttgtgatttatttttccaactagccgtccattccgtataaaataatggatggcgccaaaaaaaggcagtttcgtctttagggactctgcttatagcaccaccccaattgataaaaaagaaattggcttctgttccagtagcatcttccaaaaattttctcatgattgaaatgggttcgtcagaccaaaaatcatgaccccatgccgaggagaatttaacactctgatcatttctgccagggatgggttcgtcagggtctaagaaatctatagcatctggatagtataatgttttgatatctgcttctgttggagttcccgcatgtaataaaggttttaataatcgaatcaattcagttttcgaaccgaggaaaattccttctgcatgacacaaaccatttattttgctgtaaatttcaaggtagcatcctaatcgttcatctacaaacggagcccatttctgccaagctttaaataccgtttctaattgttcccacggccagataatattgaagacggttgcagttttaggggcacgatgaactttgaatgtatattgggtattatatccaaagttacctcctcctccgcctctagaagcccatagcaaatcctcattgtgagattgatctgcgtgaataatccttccttttgcatctaccgttttcagcgcgagaaggttatcacttataaggccaatcgatcgtgagagtacaccaaatccgccgcccatcgtaattcccccgattccaactgttgggctatctccaaacggagccataaaaccgtctcgagctaatccctttacaagcgggccaacgggaataccagtttgaacggttgcaatagcgttttcttcatctaagaaaactttattcatgtcactcacatcaataacaattcctccacttactactgaaaggttcttatctaaagcatggcgaccgcttctgacacgtaagggcactttattctcacgagcccatttaatggcattacttacatcgtatgaattttgcgcaaaaacaaagacaagaggatagacatccacataagggttccaattcttaatagcctctgtatagccggggtctcctttgaagattacacgccctgtcaactgtgttgatcccatatattatttcactcccaaagaaattcgattcagatactaaaatatgcaggagctggataatcgcatagacaaatgatctacgaactataaatataatacgctaaggcctttttcgtcggtgaggtctgctgagaaacatttttcaaacaattttgagcaaacttcctgtccaatcctccaacaagcgttttttcttatcgtttttaggagcagtgtccagtttttttcggagtgaatattcgtttaggccaaaagaaaagagagatgaagaagtgtttagtaccagaggtatacatccatacaacagactctagatcatcatatactgaatgtatgtagaaaggagacatcagctttggcaaaatatcggattatgacctttgacggcggcggtaccttaggtgctttaagtttacaactattaaacagattggctaggcaaaacccgaagttaattagtcgaacccatgtattttcgggaaattcaatcggttcatttactgcccttgcattagcaagcggaagatctccgagggaaacacttcagtattttgaggatgaaatcctacccgcattcagcatttcccggccaggcggacctgttttcaaccaacaattaccctattccggttttattaaagcggtaagaaattttttcccagcagatcttcaacttatagatttaagaaaacgaattgttgtcccatcattcaaattatactctcaaaaactggaccgttggactcctgtcttatttcacaattttcccggctctccctatttaaatgaaaaagtgagtgatgtcatactgcggagcagcggtgctcccgcgacgcaacgcgcctatcaaaactatgtggacggatatgtagtagcaacgaatcccagtacagccagtatcgcgtttgcagttggtaaagccaacgtgccattggatcaaattgcggtattgtccatcggaacaggtgaagccccgactcggttaagaagagatacgaggggatggggaatggtaagtgcagataacatacgtcccgaaaatctgaagaaccttcctccaaattggggagtccttttggacaggtcgcctaatgaacctttactgccatttcttcagatgattgctggcggtaatgggtactatgaatccatggtcagtgcgaatcttctgggagatcgttttttccggttagatccgcggattccgaacttctccaaaacggaccctgccgtcgttcccgctgtcattgaaattgcgaacaaaacaaacttacagcctgcgaatcaatttatagagaagaactgggggagcaaataattatttattttaaatcaattctcgcttatacaattttgtccgagagaagattctcaaaataaatacaggcaatgggtagaaccggatttttttaaaggtttgttaatcacaagctaataagatgaatgaaaaaatcaattcatacttcttcttttgaaagtgagggttcaaactaaagaatgtaattgaaatgttactctaaggtatgcaattccctttttcacacaaaaaaagacaagagcggcaaatcgccaaacccttgtctttcctgttgttctattggacgcgctcggagggattcgaacccccgacagacgtggtaccggaaaccaccgctctatccaactgagctacgagcgcatatagactgcgttatgagaacgtcagcacaactaattatacgataattcctttcaaataacaaccctctatttcgagaggccgttttttaaatagacaaagcatcttaattggcaatctgacatacgatggtttgaacccctgtatttttggggaaaatgggaaaaagagacgactttgcatatcaggccagctttttgtttgacctttattgaccaaaaatgtatcatgtaactacatacttacctaaaaggtgaaggaggagcattatgaatttaatacctacagtcattgaacaaacgaaccgcggggaaagagcgtatgacatttattctcgtctattaaaggatcgtatcatcatgcttggatctgcgattgatgacaacgttgcgaactccatcgtgtcacagcttttattcttagcagcagaagaccctgaaaaagaaatttctctttacatcaacagcccgggcggctctattacagccggtatggcgatctatgataccatgcagtttattaagccgaaggtatctacaatttgtatcggtatggctgcgtcaatgggcgcgttcctgcttgcagccggcgaaaaaggcaaacgctatgcgcttccaaacagtgaagtcatgattcaccagcctcttggcggtgcgcaaggtcaagcgacagaaattgaaattgctgcgaaacgcattctcttgcttcgcgacaaattaaacaaagtcctagctgaacgtactggccagccgcttgaagtgatcgaacgcgacacagaccgtgataacttcaagtctgctgaagaagcgcttgaatacggcctgattgacaaaattttgactcacacagaagacaaaaagtaataacacaacctgcaagagctgcgtctcttgcaggtttttttcatttcaaggaattgactcccttattctatactgctcccattcctcatgtaacagctcaagcgtcaaatcactcgtctgcctcacaaccagatcagcaccaagcatcggctgtccttgaccgacaccaaccgcaaacatccccgcagatttgattgcagaaatgcctgcttctgcgtcttctattgccgcgcaatcagcaggggaaacatcgagcatcgctgcagctgttaaaaagatgtcaggatcaggcttccccttcgcaagagtcgtcggatcaacaatggcatgaaaatcatcgataattgccaagcgtcttaaaatcttaggagcattgcgacttgaagatgctaacccgatttttatattttcgtttttcaattgacatagaagcctgccaatccccggtaaaagatcttccggcgtcaatttgctgatcagcatttgataatcgcgatttttccgatgcataagctcttgtttctccgcatttgtatactttgtttccgccccgccaaagatcaatatgctttcaagtgactcttctctgctgattccttttagcctttcattcatgtctctgtcaaaagggatatcgatttgttctgcgatgtgcttccaagcgagaaaatgatattcagcagtatctgttatcactccgtctaaatcaaaaatgaccgctttcatatactaatgcccatcacagcttcataaggtttgaggctaatactctttaagtcagcccgctcctgcggatagtttgaaattagcactttccaacgctcatgaatcagttctggaggcgcttcgaacagagccttttcttccgataaattcacaacgacaagaagcttttcccctcgatattctcgaaggtaagaaaagacctgcggatcattctcctgcaacagctgataatcgccatatatcataatcttatattgctttcgtaattgaatgagcttctgatagtaaaagaaaatcgaatcttgatcttccaaagactctttcacattgatatcttgatagcgggaatttaccggtatccacgggtctccggctgtgaatcccgcatgttttccggcatcccactgcatcggtgttctcgcatgatcccttccttttatcatcacggctttgacaaactctttttctgacatcgttttgttttcgacgactagttcacgatatgcattctttatttcaagatcatcatacatctccagcggcatatcgctgttgaccatgccgatttcttctccctggtaaataaacggcgttcctttcatgccgtgcagaaccgttgcaaatgccttcgcacattccttacgcagtttcctgtcattgccccagcgggaaataaccctcggctggtcatggttctcaaaataaagggtattccagccgacattcattaacccggtctgccaccttgtcatcgtcttttttaaagcaatcaaatcaaacggcttgatctgccatttcccatttggcgagttttgttctttatcaatatccatatgttcaaatgtaaagatcatattcagctcttgcctgcttgcatctgtgtactttttcgcctcttcaatatcagagccgtttgcctctccgactgtcatgcagtcgtaatgagaaagcacttccctgttcatctcttgaataaactcatgaagacgtgggccgttagagtgataacggccgacaatatagctgcggctgtgatccgtttcgtagtccggaaaatcggtgtatttagaaatagagccaatcacatccatccgccagccgtcaacgcctctatccatccagaatctcattacatcataaacttcccggcgaacggcttcgttttcccaatttaaatcaggctgttttttcgaaaagtagtgcaaataatactgccctgttccttcatcgtatgtccacgctgagcctgaaaagatcgatccccaattattcggctctgagccgtccggtttaggatctttccaaagataataatcccggtaaggattgtccttcgacttgcggctttcagcaaaccaagcatgctcatctgatgtgtggttcacgaccaaatccatgacgattttcattccgcgtttatggacttcatcaatcagctgaaacatatcttcatttgtcccaaacttttcgtacatgtttttgtaatcgctgatatcatatccgttgtcatcctgcggggaatcaaataccggggagagccagatgacatccgccccgaggtttttgatgtaatccagcttttgaatcacaccttgcaaatctccgaatccatctccattggcatcataaaaactgcgcgggtaaatttgataaacgacagcttctttccaccattcactcattaggcgttctcctttcacatcgtccctgtaggacaaccggttcctcataaacgttcatgtgcagcggctcgccttttacaagctcaaaaataacgcgcttttcgtcaaccgtcacattgattaatcgatttcgataattgatgttgaatgaatattcgtcccattctttcggcaaaaacggagcaaatgacagcgtctcattcgcggtgcgcatgcctgcaaagccatgaacgattgccagccagctacccgtcattgaagtaatatgcaagccttcttccgtatcatgattgtaattatcaagatcaagccttgctgtgcgcttatataattcgagcgctttcttttccagcttgagttcggctgcgagaatcgcatggacagagggcgataggcttgattcatgaacagtcatcggctcataaaattcaaaatttcgccgtttttcttccattgtaaaacggtcattaaaaagataaatgccttggagaacatctgcctgcttaataaaattggagcggagaatcttgtcccatgaccaattctggtaaagaggccgttccgctggatctaattcgtcaactgtttgcaggtctttgtccaagaacgtgtcatgctgaacgaaaatttgcagttcttcactaaatggatagtacatgtgctggatgatttctctccagacttccaattctacttcctgcacatccagatggcggcgtttctccgctgagatactttcgagactttgtagagtatactccaacgtccaagccgcaatgacattcgtataccaattgttgttaacgttgttttcgtattcattcggccctgtgacgccatggatcatatacttattttttcgtttcgagaagtgaacacggtcggcccaaaatctgctgactgccacaagtacgtctatcccgtattcttccatatagttacggtcgcctgtataattgatataattgtagatcgcataacagatcgcgccattgcggtgaatttcttcaaaggtgatttcccattcgttgtggcattcatcacctgtgaacgtcaccatcggataaagtgcccccttcatccccaattttgcagcgtttcgtttggcagcctccaactgatgatagcgatacaaaagcaggtttttcgtcacctccggctcggctgtcgccaaatacatcggaacggcgtacgcctcagtatcccaatatgcggcacctccatatttctcgccagtaaatcctttcggcccgatattcaaacgggcatcgcccccgtaatatgtcgagaataactgaaagatattgtagcggattccttgttgaagctcctcatctcctttaatctcaatgtccgcttttgcccatctttccttccatcgatcagtgtgcctccgttttgcatcttcatagccgttctctaccacatccgccaaaagctccttggctttcgataaaagctcttcctcccgaaaatcacgggaagtcgtgacaatcacaaactttttcaatgatgccttcgtttgataactgtagcgattctcgacatacatttcagtcgttttaaagctttcatggacaaaaccctccgtctcgtttgccattgcggctaataccgtgaagcgcggtgttccaaatggattttcgatcgtttttgccgctaaatggccgctgtgagaatcagcacctttcgcttcctcctgccaaaactgttcttggtagttagaatcttcatttgccacatttccatccaggtaaggaacaagcgtaatgacagcatctcccgtcaagcactccgcttcataatgaatcgcacagagttcttttacagcaaggctaagaaaccgctctgacctgattctgacggttttatcttgaatgcggacaacagcgcttcgccgcagaatcccctctttcatattgagttctacctcaaataattcgattgggttttgatggagatcgattttttcaccgtcaacatataggcctatgcccataaagttcatcgcattgatcacttttccgaaatattctggatacccgtttttccaccagcctactcgcgttttgtcggggaaccacacgcctgcaatatatgtgccttggtgactgtcgcctgaatagccttcttcaaaattccctctgacccccatatagccattggcaagagacgtcaggctttccagcagccgtgtatgctccttattaaatgtatttgttttgattttccattcatcaatctcaaataaccgctgatttatcatcatttcctcccgaatgtaagtttccattatcacggcgggttttggtcaaatatctaaatgcaaaagagatcatcaaagtaacgccacacgaatggatcatcaatacagtaatcaaatcaaaatgaaccatgccgatagcagctgccgcaaatgccggcagtgctgatgcgcaaatcgctatagaggccgcttccttgaatgatgcaatagagaccatgtttgatatttttgtgatccagaggccacctgcaagaacaaacgttaacaaaagctggatcatagaaaccaccgtatatgccagcatcatgatcatcggcttatactgtgccaaccacaatgtatcgatcaagacctctacatcatggacgtttggtttctcgagcttaacgtccattttcgcatagccaacagaaaaccccgtttcgttttgatcggtgatcaccagttgatcaggttgaaatatgatggcgttttcaaatccagttactttcaatcgcccattttcaccgcttgtctcatattcatgcttcatatcgactgccatcacattctgcccatcttcaatcctctcagagctcttcccgcctgttagttttccgttcctgatttgaaaaccctgcaattgatcagcaaattgatcattaactccttgaatcgctgacggcatgaaagatgaaacgctgaagcgatccattttcacaaacgaaaccgctaacggcgccattaagcaggccgttaaaaacagaaagagaaaagagagctgcagccagctgaaggtattcccatagcggcaaacacctgatggggatgcagccgccttcaggcagcggatgataaagcttttattctccagattcttcattggcattacccctttgttccgccggctgtcaaaccggacacaaagttcttttggagaaaaaagaatagaacgcatatcggcagtgcggctagtatggcaccggctgcaaatagagctactttttgctgctgcggattagaaataaaggattgtaatcctacagcgatggtcagcctttccggtgagcgaagcagaaatttcgtcagcaaatagtcgccaaacggtgccataaacgcccaaagcgcttgtaccgcgagcattggcttaacaagcggtagaacaattgaagcgaaaatcctcagatgtcccgctccgtcaattcgcgcggcttcatcaatttctctcggcacagtatcaaaataacctttcatcagccacgtgttcatcggaattccgccgccgatatagatcgctgttaaaaaccagtattgatcgagtgcgcctattagcatcgccaagacataaaaagcagtcagcgccgccattgtcggcaccatttgaatgattaaaaagaatatcaggctcttttttctgcctgcaaaccgatagcggctgtacgagtacccggcaagtgtcacaatcgtaacctgcaaaaccatgaccgatagcgcgatgacaagtgtattgctgtaccaattgagataaagcgtttcgtcaaatagccgcttaaaatgatccaatgtccaagaacccgaaaaatcgagctgaaaagccgccgaattccccacacggaaggctgatgatgccgtaatcagcaacggatatataatgacaatacttaaaagcgtcaaaaataaatacgtacagattttattaagcattctggcagtgctcgcgttcacctacataacctcctcattgccaaaagcattcgattttttgaaagcaatcagtgaaattccaatgacaatgaaagaaattaacagtgtcacagccgccgcaacggaatattggggtgatgtgcctgttgtcagtttataaatccacgaaattaagatatcggtcgatccggccccggctcccgcactgcctggccctccctcattaaataaatagatgatcgagaaattattgaaattaaacgtatactgagtaatcatcacgggtgctgtggcaaataaaatcatcgggaatgtaatatgccgaaaacgctgaataaaagtggccccgtcaatctttgccgcttcatacaattcacctggaatcgcctgaagcactcccgttaccatgacatatatatatggaaagccgagccacgtttgaatcataatgagggctgtctttgtccagaaaggatcggtcttccacgcgatcgcaggcagctcgacaaacggcaggtgattgaataatggtatcacctgtgcattcaccgctcctatgctgtcgttaaacatgttggaaaaactcatgattgtaataaacgccggaacagcccatggaaataagaaaatcattcgaaatatccgcttgccttttataaaatcctgattgacgaaaagtgccgtcacaatacctaaaatgatttgcagcgttgttgcacagattgtccagataaccgtccagcccagtacattcacaaatgtttcacgataggagccaaggaaaaaaatatttaagaaatttttaaacccgacccagtcaatcagacgattaggcggaatatgataaaaatcatagtttgttaatgcaacaaacagagtcaccaaaaccggaaaaataatcacaaacaccatcatgatatatgccggcagtgtaaatagatacggaaaacctttatcgcccgcatgacagatcatatccttggctgttgtattgacttccaaacccgccgctttcatagcggcggtcttacgtgaatcatgaatattaaagatatagaacatgaggaaaatcattgtcacgatcaattgcagcgtgccttcaatcagcataaacagcgagtgatcttcaccgggaacacttcccaatgtcatcaatccggttagcgcctgtataccgaaaacgcataattcaaaagcaaacaagcctgtgatggcaagaaataagagcccctttgacaactgctgattcgcaatctgcccaagtcctggaatgatcgataaaagccctgcctttcgtttttgctttgtaagtgtgtgatgtttattcatttttccgccctctattcttccggacgctatcccgccgttttatttcacatacttttctttaatattttcctttatgacgtttacagcatcattcgctgatgtttgtgtcgatttttttcctgaagctgcatcaaaaattaaactttccgctcctgtccatacttcagccatttccggaatatttggagtcggcgttgctgtttcatattgtttaatcacagctgacgtcagttcattcttttgctcatcggctttcttccttgcagccgtgttggccggaacttcgtttgtatcctcataaaaagcgtaagcattggcatcatttgcagcatactcaagccatttttcagccagctcgggctcttttgtatatttcgaggcaacccagcccttcccgccagcaaaaggggcgtattcttctccatttggcaatgtcggaatgggagccgctccgtagttcaatttagcctctttatagttggcagctgaccaaggaccgccaatgatcgcagccgctttgccttctaaaaacatctgctgaataaagtcgtctgcgcttgaattgtcttgcattcctttcggccaatatgtctcaaaccatttctccgcatatttcaccgcttctacagcccctttattgttcaggccgatgtccccggaatctgtgccgttttttccaaacacatatccgccgtatccagccaataagccgtacgacatataaaagtcagtccattttgctaaaaatccggttgattttcctttttccgaagcaaacgcgaatcgaggatcttccgttaacttttcaaggtctttaaatgtttttggcgctgtttttaaaagatctttgttgtaatacaaaataagtgtctcaatgactagcggcattccgtacactttgccgtcaactgtcacctgctgcatttctttatcaccaaagctttttgtgttagatggcttaatatcaagtaaatgtccttgttgtcccaaaccgccgatccggtcatatgcagcaagcataacatcaggcgcattacccgccgggccatcaagaggaagcgcttctaactgttcgaacatttgcttttcaacaatttttactgtgacatcattttctttttcgaactttgtttttatgctttcaatgtattctttatacgtttcttcgacagacacagtcagcacctttttgccatcagagcttgctggattttttgaacttgagcaggcggcaaggccgattgccaggaatgatgccgccaatatggcgaaccccttttttaaaagaaccatctcttttcctccttctatttacgaaactataacaattgtattgtcctatagaaagcggttacaacaactttcgatttgttaccgataacagaatgttatacaggggcggcagcactcaaaatcaaaaattctcccggctgaacggcaatgacatcgtgatgctgtagcggctgctctgtccatgcatcacagattttcttattcctatcaatattcaactctcgtaaactgacgtgttgaaccacattcccttgattaaagaaataaatcagtattttttcatcaagagtccgcgaaaagctaatgaaatcatttttgtcgtccagcagattccactcaagatgtccttcagtcaataaagtgttttcctgcttgcgtaaagcaattaaccgtttcataaattgcagcatgtcttggttttgcttctctttttcccaaaccatacatttccggcataatggatcattttcgccgttcagcccgatttccgttccgtaataaatgcatggtgagcctgtctgggcaaacataaaggccagcaacgcgcgtgctttcttctcatcattgcggcatctggtcaaaaggcgctttgtatcatggctatccagtaaattaaacatcacctcattggcctgcttcattccattcatcaaatgtgcattgacacggtgagccatacgtgaagctgagatcgtctggtcagcaaagtattcaatcataggctctgtaaaagggtaattcatcgccgcatgaaattcatcccctctaagccagggttcggcagaatgccagatctcacctaaaatataaacatcaggcttttcagtagatacagcctgcctaaatgtcttccaaaaaacgtgatccacttcatttgcgacatccaaacgccagccgtcaatgtcaaattcgcgaatccagtacaaagcaatatcaagcaaatatttctgcacctcgggattagccgtgtttagcttcggcatatcagctgtaaaagcaaatctgtcataattgtcgtctgtgacgggaaaagagtgaatatggaaccagtccttatagcgggattgatctccgtttttgacgacatcctgccattgcggagacgcgcttcctatatggttaaaaaccgcatcaagcataattctcatcccccgctgatgcagctggctgaccaatgtacgaaaaagctcaggatccccgaaatgcggatcaatagaaaagtaatccagcgtgtcgtatttatgattagaaggcgcggaaaagatcggtgtcagataaatgccgttcacccctaaatcctctaaataatcaagcttgtcaacaattccttgtaaatcccctccaaaaaaatcattgacgtccgggtccttgctcccccacggcaatgcattcttcggtgacaagtcttctcttccatttgcaaaacgctccggaaaaatttgataccaaaccgttgacttgacccattcaggcgcttgaaatgtatcagcctcgtgaacaaacggaaatttaaagtaataatgaatcgtttccagtgttttttcgttataagggcatacacccgaacttccgaaaaagatgtcttcatgatcgtctgttacaacaaacgcatattgtaaacgcctaaatggcggcaccacttcagcaaaccaatagtcatgcatttctgtagcagcaattttcctcatcggctgctcgtttgccgaccatttgccgtcgttgtactcatagggatcaccccaaatgaatcgaatgtgatctgcatcaccttttttcgtccgaatcttgatatgcacagtccgcccatcataagaataagcatctgtgctgaatggctggtgatgaatcgctgcatattccatcatgtttccccctttgatttccgttttattgaagccggctcatagtttgaaagtatcatgatgaaattgtgggaacaatccttttcaccctgttaccgataacagaataaggcgcttacagcgttgattctcgtacaattaactctggttcaaaaaatagacttccttgtgcagcgccgtcttcattcatttttttcagcaacattttcgcacaggcttcccccatttcaacaacaggctgtctgaccgtagtcaagcgcggcgaggagatgcgatcaagaaacacaccgtcattcccggtaaccgcaacgtcttctggaattcgctttccaagggattgcgccgcacgaatgacgccgagcgcgattcgatcagatgcgcagacaaatgcggcctgattgtccatggatttcagcagttctcttgcaaggcattcacttttcttagaactgttgtcgatccgaaacatattcgattttttaaagcttttattcatcgcccgtatatacccctgttctcttgcacgttcgaaaggctcatctaaatcaatgccaaaaaagacaacttcccgctcccccagccccataacatggcgggttgccataaaagtgcctttctcgttattcacatcgataaagtcatagcccatttcattttgtccaaatacgacgagcggcttctcaaaagcttttattacaccttcaaaatcgttctttctcaagccggtggcaataatgccgtcacattggccaatattaagagaatttcttgtcacaagctggagagcatagtgattgcgatccagctccctgctgattcctgtcagcaggttcatgtaatatggttctgtcgtatccatttcctcaagtatcaatagtttcacaacctgtgttctgttttgcacgagcgctctcgccgcataattagggatgtaattcagctctttcatcgcagaatgaacaagctttttcaattcatccgtcaccgtctcagggtgattgatcactcgtgataccgtcattttcgaaacatttgcttttttcgccacatctgacaatgttgccattttcatcccctccttatctgtgcttattatccaaactagtgataaagtcctctattactgctaaatatacgatgcaggccaaagagaaataaaaaagagatttcccttaaggaaacctcactttgttaaaaacactcgatttttcatggattcatacgctaggtggcagactcattctctccacttccatcagaaaatctcttttttaaatttctgtccactttttttctaaaatcggataagaataattttgcatttgctcaattaactcatccggccgtgacgagctgtgaatcagttttaggtgcgattcgttagaaaacccttcttgaatgctgtatttcaccattttcatcattggttcaaaatatccgtttacattgtacagtccaattggcttttggtggatgccgatctgtgcccagcacagcacttcaaataattcttcatatgtaccgaagccgcccggcatcgagataaagccgtccgccagctcgctcattttagcctttcgttcatgcatcccgtttacttcaatcagctcagtcagattctgatggacaacctccccgctgaacaaaccgctcggcatgaccccgattgcagttccgccgttttccataatcgcgtcagcaatcgtgcccatcaagcctacgcgggagcccccatagacaaggccgattccctgctcagccatatacacgccaagctctgccgcttttcttttatacgcttcatttcccccagggtttgatcccgcaaatacacaaatggttttcatcttgtcatctccgcatctatatatcgtgttaaacattcaaaaacacactatatattgtcccatcttcatgtgataatatcaatatgaaatacataaagaatgcaggagtgatgaggttgcagctggctgatgcagaaaaatggatgaaagagttttacgaaaaaagaggctggacagaatacggaccttttattcgcgtcggctttttaatggaggaagccggagaactggcccgggctgtcagggcgtatgaaatcggcagagaccggccggatgagaaagaatcgtcacgcgctgagcaaaaacaagaattgattgaagaaatgggagatgtcatcggaaatatcgccattcttgctgatatgtatggtgtctctttagaagacgtcatgaaggcccaccaagaaaaactgacaaaacgatttgagcatgcataaaaaagcggccgcgatggccgctttttttaacctgtgatttcatcatggtgatcaaagaaatgctgctttcctattttgtgaaaaaggcctgttttatgcagtagctccttcggctgcgattgcaatcctacaatcatcagctttccattgtggcgtttaattcgattcataatgttcccaagcaccgcttcagctgacgtatccatatagtgcaccttattcatgagcagaataagggttttcggttttttctgtacatgctccagcaatgacgattcaagggaatcaattgatccgaaaaacagcggcccttctatggcatacatgctgacagatggatcttctctcttcgccagaacaggatgcgtttcctgattgtggatgcgggtcgcttcgctcattcttctgataaagaacacgaatgcaagcagcaatccggttgccacaccgatgattaagtcaaacagaaccgtaagggcgaaggtcgccgccaaaataaaggaatcagcatttttcagtctcagcatgtttgcgacttccttgcgctcactcatattccatgcgaccaccatgagaatcggtgccatactggcgagcggcacatgggacgcataaggcgcaaatacaagcaggacaaggagaacgactacgccgtgaacgacgccggaaactggggaaaccgctccgttttttatattggtcgccgttctcgcaatcgctcctgtagccgggattccgccaaacaggggcgctgccatattcgcaatcccctggccgacaagctccttgttgctgtcatgctttgagcccttcatgttatcagcgaccattgcggacaaaatcgactcaagtcctccaagaagcgcgatgacaagcgcagccggaaacagcataaccattttatccaaagtaagctcaggaaactgaaattccggcaaatggcgggggatttctccataagttgacccgatcgttgccatgcggtcagggaaaaagacaaccgcgaccactgtggaaataagaagcgccaacaaagcgcccggcactttaggcatcaccttggcggatacaagcaaaatgacgagcccgatcacagctgtcaaaatggcatacacgttaaaggtgccgagctgctgcacaatttcaaacatgttgtgatgaaagttctcatgtttttcaacatttctcaatccgagaaaattagcgatttgttccgtaaagatcagcacggcaattccggctgtaaaaccgacgataacgggtttgggcacgaatttcattatttttccgagcttaaacagcccaaacagtaccagcatcactcctgccataaaccccgcaatcagcagattttccaagccgtactgcatgataatgccgaataaaatcgggacaaaggcgcccgtcggaccgccaatctgatattttgatcctccaaacaaagaaatacaaatccctgctataacaacagtgtatagcccatattcaggctcgactcccgaggcaatggcaaacgccattcctaaaggaattgccacgacacctactacgatacctgcaatcaagtctttctgaaatttctgcaaattgtatcccttgaatctccctgagaatcgcatattttgttataacctcccttatgagtgattgtttataagctcagtttcataaccgttaatgaccacatcaagttttcctgtttcagggtgaatgacaagcccgtgaaccggcacttttttcggaagcagcggatggttcttaatcatgttcacactgtgggaaacgctttcttccacgctgtgaaaaccagtcagccacgttttcaaatcgagtccggcactcgtcagcaaattcaggcagctatcctccaccccgcgttcctttgctttctcaagaatcgaggacgcattcagccctgacattccgcattcatgatggccgacaatgcatacctcttcagcctgcaattcataaatcgcgaccagtatgcttcgcatcacgcttccaaatgggtgagaaacgatggctcccgcgttttttacaattttagcatcaccgtttttaagccccattgcttgcggaagaagttctgtaagccttgtatccatacaggtgacaatgacgagctttttcgaaggaaactttgtcgttttgtacggttcatacttcttctcactgacaaaccgctgattgtgttccaaaattgatgttaaagaaaccatttgattcatctcccatccatatgattttgcaagccttcttacccagcttacagtaaggaattatagcataggaataagccaagaaaaggttttcaaaaaaagacactataattggactgtagaatcaaaacataaacatttatatctttcaaagataataaaatttatatttaatgcatcctataatccggctgcagttcgtatatcgatgatttgtctgacaaaaaatatgggtgaattctgataattaaaaaacttttttaagcagatttagctgttcgatcttcattttaagttcaaaagaaccagaaattaaaaaaacgcagctatatttttaacatctatttattttcgatataatgaattagacaacagccataaagggggagccttgttgaaaccatttgtatttatcacaaaaccgattcctgaagagattgaagcattcatcggtgaacattgccgttatgaagtatggcaggaggatacgcttccgagtgacgtgctatttgaaaaattaaaagaagcggaggggcttttaacatcagggacgtccggaccgtcaatcaatcgtgagttgctggaacacgcgcctaagctcaaagtggtcagcaaccaatcagtaggctacgataacttcgatatagaagcaatgaaagaaagaggagtcgtcgggactcatacaccttatacactggatgacacagttgcagatctggctttttcactgattctgtcttccgccagacgtgttgccgaactggaccgttttgtcagagcaggaaaatggggaaccgtggaagaggaagcgcttttcggaattgatgttcatcatcaaacgttaggcattatcggcatgggcagaattggagaacaagcagcgagacgcgccaaatttggttttgatatggaagtgctttatcataaccgacatcgcaaacaagaaacagaagacagcatcggcgttaagtatgcagagcttgatacattgctggagcaatctgattttattcttctcattacgccgctgactgatgaaacctatcacatgataggagaacgcgaatttaagttgatgaagaattcagcaattttcgtcaatatttcccggggaaagacagttgatgaaaaagcactgattcgcgctcttcaggaaggctggatcaggggagccggcttagatgtatacgaaaaagagcctgtcacccaagataatccgctcctgcagctggataatgtcacgctgcttcctcatatcggttcagcaacagctaaagtgcgcttcaacatgtgcaaacaggccgccgaaaatatgctcgcagcgatccaagggcaaacaccgaaaaatcttacaagagaatttcaataaatcaaaaatccggtctgataacagaccggatttcatattacatacgctgaagaacagcacgcttataaatatgacgggtgacgatataataaagagcctggaatacaaaataaatgaagatgacaattacggcctcaagaaataaattggaattcagcatattacttaacgctgcatacgcaaagcccgcgtgaatcgtacctgcgataaatgggatgaagaataaaaatcctatttgctttccaaggatcgagtgaatctctttgtccgtaacccctatcctctttaacgctaacacctgcactcccgtatcttctatttccgtaaacatccgcaaatacagcatgcttccttgcacgataaaaaacagcacgctgacaaacagaccaataaacagcattaatgcaactccctgcttcacaatttgataactaggagcacgtgtttgaaaatcagatgtatgttctttcggcaccatgttttcaagcttttcagagacatccaccgtctcctgccaatgctcaagctcataacctaccattctcatctgttccttcagcggcacatcctgtgacagactgtcaaagctcttttcgctgacaaccaataaacggctgactccatcgacagacatcaatatccctttgttttgctgctttttcatgacataggaaagggtttttcctgacttcatatgaaatgctgctgtttccccttctccaaatgtgtctttcaccatcatttgaaaagaaacattaataaatgcttcattttcttgtaaatgaataactgggaaccctttttcctttgcgacttgattatagactttttctgaaatcagcaaagcttcagcttccatcttcttatttccatacggcaagtctgactgaaaagtgacaggaatccctgtggcatccaccttatacgtgataacagcatgagcttttttcaatgtattctcagccgtctcaggcttcatgacctgaaagcgggaagcatccttttccacccaggaaacagactgaggaatgctttgctcctcctgcctttgtaaatcggaataaaacatatagatgacacctgtagctgttagtatgaccgctgtaatgacagaggttaaaaacagcatgcgtgcatgatccttcagcctgaatatcatgttggaacgcacaatgatatttgtgcctttgtagaagctgtgtttctttcggtacagcatgcggaaaaatgccacactgctttgggtaaaaaagaaatacgtgccaattaacactaaaatcaaaattggaaaaacccgaaacatcatgtcaattgcattggctgttgcagatagataataaccgctgccaagacatagcaaagacaatacagtgagccatttcgaataaactggcaaacttttcggctttttggctgatttaatcagttcaatgatttccagcttccgaatccgtcccagtgataaaatgagcagcgtctgaaacaggatgagaaagccggcaattgtcatcacaaacgctttcggcacaatggcaaacgaaatcggcaccttcacgctgagcatccatgtcatgatcataaaaaacagttttgaaaataacaggcctgctccaatgccggccgcaatcgccgcaagagaaataagtgactgctcataataaatcatcttgcgaagctgctgctttgatgtgccaaacagtgtcagcagcccaaactctttctttcttgcctgcaaaaacgctgaattggaatatgtgatgaaaaatatacaaaacacaatgatgacgacaagagctgcgctcaagcatgttttgacaaggcttcctccatatatattgtcttcattgacatcaggatgaaaaataaatgatgtgaagacaaaaaacaccgaaacggcaaacacacagcttaaaaagtaggccacataccgttgcagattcccaagaatgtttttacgggcgatagttctcaaattcatgaaaatcgcctcccaacacactcaaggtatccaatatactttgataaaacacctgcctgtttgttcctctgtgaatctctgaaaagaaacgtccgtctttaataaaaacaatccgtttacagaaacttgctgctgtggcatcatgcgtaaccaacaaaatcgtcgcttccttttcctcattcagctgagccagtgtgttcatcacttgctttgccgattttgagtcgaggtttcctgtcggttcatcggcaagaatgagcgccggattgtgaataatcgctctggcacaagctgcccgctgctgctgtccgcccgacacctcatatgtgcggtgatcgagaatatgctttatttgcagcgtatccgccagttcatccaatcgagcttccatttctctcagctttaccttatccaatgcgagcggcaagagaatattttcacgaatcgtcagcgtatcaagcagattaaaatcctgaaagacgaagccgagttctcttctgcgaaacaaagccagctcttggtcctttaacgttttcggctgaatgccgttgatcatcatctcgccctgggtcggcttatcaatggtagccagcaaattcaaaagcgtggtttttccgcttcccgacggccccataatcccgacaaattctccttttgacacactgagatcaaaggcgctgagcgcttggtatgatattgttcctttatttgaatagtatgttttcgataggttcgttgtttgcaacacgttcatgttctgctcctcctttttctttattataaaaaggaagtcagcatcctcccatcgaactttcttgcaattccgctccccaatcttacaatgctgtcacattcacgagggtgtcacttgaaaacacgatggtcatcacagtgccagccccttcttttgattccgcatacagcttatggccgagacggctgcacacctgttttgctaaataaaggcccattccagttgcctctttcatggttcgtccgttttctccggtaaaaaacgcgtcaaaaatccgcggcagatcctgcggcggtatgccgattccttcgtcggcaaccgacaagcgcgtctcatgtccctgtgtttcaatccggattgtaatagggtctcccacaccttgctttgaatattttaaggcgttgaaaaggatttgctcaacaacaaaggaaagccacttttgatcactggaaatctgaacggcatttggcggcacatgtaatgttggaaaaaggcgccgcttgataaactgacgtttttcctgattgatcagtgaacgaaccatttctgccaaatcaaaggtttgcggctttacatcaaatgcaaattcctccagccgggccgtttgcagcatcatatcaagaccgtggcgaaatctctcattctcatcctccagctcctctaaaaacgtcggaaaagaggatgaggttccgttttttccttcctgaatcattaaggatatgacagataccggtgttttcatatggtggacccattggttggtgaaggtgtaatgctgtttttgctgattgatatattgtgagagcctgctttcgtattgctgcccgagtgcgttgatcatcttcgtccaaagcgcttgctctcctgttcttggctttctggctttcaaagactgtccgatgtcattcgaagaagaggcttgttctgcaagctttttaacatatgtgagaaaggaaaattgccgaacataatcagcagcaaaacctgcggctaaaagagtaccgggcaaaatccatatgtacatcatattttctttggaaggttctgcgccgctctctacaatgcttaaatacgcaatcagcatggcggaccctatccctaataatgaaaatagaataatggctaagcggtcgatgagataagtctttaacattccgcttcatccttccgattgacttgaaattgataaccttgtcctctgattgtggaaatgcaatctgtcagtcctgcattctccagttttctccgcagccgattgacattgaccgttaacgtattgtcatcgacaaaatcaacgtcatcccataacgcctccaatagttcatcacgagagacaatttttttatgctccctcacaaaaatcgagagaagctggaattctttttgggaaaacaaaatccggacgctgttccattcggcctcattctgatcaggataaatcgtcagcccgccaagctccactattctagattcctgcggcaaagagggcgaatattcaccatatgtgcggcgcaggacgcttttgattttggccatcactacctctagatggaacggctttgtgatataatcatcgccgccattttcaatcgccattacctgattcagctcatcggtccgtgccgatataaagataatcggcgcattggaaatggtacggatttgcctgcaccaataaaacccgtcaaaaaaaggcaggttgatatcaagcagcacaagatcaggcttcatttctgcaaattccaattttatatcattcagctgttcagcaattttcacttcatatccgtatttttgaagatgaccgcccagcaaagaagcaatccgctcatcatcttccacaagcaaaatccgatacacgttgatcccccttatatgtacatcacgatgatttttctagaagattccaaaattattatagcatgtgcggaatagtaaatcggtctttttctttttgttatgatagaatgataaaggtaaaattttcataataggcaggtgtcgtgatgaagaaaatcatgctgtttctggcaatgacgtcaattctttcagcatgtcagcccaactataccgggaaatacatagaaattggggatacactaactgactataccaaagagtgctttaaagagaatgaaattccttataaatacgaaaagggaaaactgtatatcccagaagacgcatttgatacagcaatctacacttgttcataagaaaaagcttgcagataacctgcaagcttttcacgttacaaaaaatgagtatttaatttctcttcaaatcctgaagggccgatgtcgcttttttgaatgttaccgccgttttcataaatcgtaaaatggcgctctgacatgaccatccttccgctcggcgtcagctttgaggcaagcagggatttgttaaaaggagatttttcatgagagtgaatgatgtccttcatgttatctaaatcaccgagatcactctcttcaagggtaaaggcgtacccaatttgccagccttctcctttgtccatcagcagaacatagctgcccttttctgtctcttcctttttgattcggaatgacccgactggtgactgtaccgtttctccggaaagcggtatcggctggagcgccaggttgatgccgaagccgatatcaacgaggtaatcgccgttttccgcagacagccatacagcagcatgcgtcccttctagtgcccatccctcttgatcgcctgcataaaccgttcctcgaatgagcttcacatgaaacccggcctcacgcaagacaaaataaaggaaaccatttagatcgtagcataggccgccgtgctgatctttgagcagacgtcgccatagctcttcttttgtgatcttataattctcttttgcaagtacggcacggttttcgaatggaaaacggtatgccattgctttaagaaaaaggggaagatcgccgaagctgacatggtctttctcccagccgattttctgaaagcagtcttttagaaagtcactcatttttatcacctaaacttcttcttgaacgtaagcagccagcttctccagcgcctcttgttcatcttctccctgggcaatcaaggtaacctcagtgcctgtgcttaccgcaaggctcatcagccccatgatgcttttggcgtttacttttttcccatccttctcaagaaacacatctgacgtaaaccggtttgcttcttgtacaaacaaagcagcaggacgtgcttgcagtcctgtctttaatcgaacttccactttctgttgaaccataagatctccccttttctttacggttattttaaagtgacggtttgccctgtccgcagctgttctgcgatttcgtcaagttttctcagcctgtgattgatccctgatttgctgattttcccgcttgctaccatttcccctagctctttcagcgtcacttcctgataatcaatccgcagctgcgcaatttcccgaagtttttcaggcagcgcctccaggccgattctttcatcgatgtatttaatattttccacctgtctcagcgatgcgccgatcgttttgtttaagttggctgtttcacaattgacgaggcggttgaccgaatttctcatgtcccgaacgattctgacatcctcaaatcgcagaagcgaattgtgagcgccaattacgttcagaaactctgtaatcttttcagcctcttttaaataggtaatatagccttttttccgttcaagcgttttgctgtttaactgaaactcatttaacaggtcacataatgaatcgttatgctccttataaagagagaagatttctaaatgatacgaggaggtttccgggttattgaccgaacctcctgccaaaaatgctcctctcatataagaacgcttgcagcatctctttttgaccagctctttcgaaatacttcgttcaaacacaaaattctccccgagtatttttaaatcctctaagatcgcttttgcattttctgaaaaacgcacaatatagacgttattctttttcagccgcattttctttctgaccagcagctcgaccgacacatcatattgttttttcagcaatgtatagatgcggcgggcaatcgccgcgttttcggtttgaacatcgagtacgagatggcggtttgtaaatgataaagctccattcatccgaatgagtgcagacagctcggcattaatgcagcagtccttcacttccagattcgttaattctttttttgtttctgatgcaaatgacatatagccacctcatttcaaggcttcattctttcagtaaatcaacaagaagagaggccactttatgtgtatcgtgacgtattacgtcatttttatacgttacaatttgatctctgatgacttcaagccccatcgctttcagctcttcgatatcaaaatcaacaggacgcgccgattccatttcgtacttacgttttatttcgtcgggaatgtcttcactgttcactaatatcgtatcaataaaaccacagcccatatgctgattgagcgctttcacatgatcagcagcggtgtaatggagcgtttcgccgggctgagtcatcacgttgcaaatgtatacttttttcgccggcgcctttatcacttcttccccgatttttgggacgagcaaattgggaagaatgctggtatagaggcttcccgggccgataataatcaaatccgcttccctgattacgtctattgtttccggcagcggatcaatctgttcaggcgtgagaaaaacacgcttaatgcgctgtccgtattctgggatcgttgactcgcctgagaccacgcggccatcttccatctcagcatgcaaaacgacactggcattggcagccggcaaaacctttcctcttacattcagcaccttgctcatttctgtgacagcgtgaaaaaaatcaccggttatatttgtcatcgctgccaaaatcaaattcccgagagaatggcctgttaagtcattccctttattgaagcggtgctgaaaaagatcttcaacaagcggctccacatcggataaagcggcaagcacatttctgatgtctccgggaggcggaattttcagttcattccgcagacggccagagctccccccatcatcggcaactgttacaatggccgtgatgtcaacgggtttatgctttaggccccgaagcaatacagaaagacctgtaccgccgccaaagattgcgattttcggcttttgtcccatcttatttccggcttctcttttcaatgtcccggtgagtaacatgagtatagtaatcctttttgaaataatcagctaaattctcggctaatgtcacagagcggtgctggccccctgtgcagccgatcgcaatgacaacctggctttttccttctcttttgtaagatggaagcataaagctcagcagatcaattaatttctcattgaacttttgcgtttcattccacttcatgacgtaagaggaaacctctttatccttgccagtcagcggccgcatgctttcgatatagtacggattcggcaaaaatctgacatcaaagacgagatctgcatcaattggaataccgtatttaaaaccaaatgacatcacatttacggtaaatgtctctccttggtttgtcgcaaagtgcttcacgattttttcacgcaaatcacgcggcttcatgtcagacgtatcgtaaatgatttgagagcggccttttaattcctcaagcagctctcgttctagcgcgatgccttcaagcggcaggccagtcgctgccagcggatgcgagcgtctcgtttctttatatcttgtgacgagaatggaatccttcgcgtccaggaataaaattcgcggtgtgatccacggattttcggccatttcatccagcgcttcaatcagccggtcaaaaaattcgcggccgcgcaaatccatcacgagcgcaactttgctcattttcgaatttgattccttcatcagctctaaaaacttcggaagcaatgaaggcggaagattatcgacgcagaaatagccgagatcttcaaagctttggatcgcgacagttttccccgctcccgacattccagttataatgacaagctgaatatcatgtgattcactaacactcatctttctcccccctgacttgtctttctatttgatgtgctgcgggtctaaacgataactgagcagctcaaattccggtgtatacgtaaatgtgccgtgcagcagcccttgtcccttcatcataaaatcaaggatatggccgtctccaggggccataggcaggttctgaatgtcattgacatcgtgccactgcagtttgccttcctctgattctgatacattttgtcctgtatatgaatcagcgacaaacgtaaacatcatccactcggagacaatgtggtcaccgtctttaataataaaggtaaaaacgccttttaattgaggatttatgatatagataccagtctcttctctgtactctctgatgacggagtctctgactgattctccgctctccatcttgcctcccggcgcgacccaccatccgcgtctcggcttttgaagcagaagaactttgtcatccgtctgaagcacacaatttgtcactctttgcaagtacgtcacctaaccttcgtcctgtcatcgtctctttattataccgcttcaagatgcctcccacaatgaagagacattgacaatcttttcttctattttacagcatattcattccttaattcagatgattttgctgtaactggaattctcttttatttatggacaaaaaaaggacacggataactggagaatccgtgccaaaaaagtgtattcattataaaaagggggtcaattactttattaatcataaccgaaaagcattacacatgtgttacagcggaattaaaacccagtaacgtaatgtgaaactcgtatgacagccctttttattttaaggttttcagcgtttcttggagctcttcgacataatgttgtacgctttgtgccgcaatgcttccgtctcctgtagccgttacgatttggcgcagtgatttttcgcggatgtctccggcagcgaaaatcccttcaaccttagtttccatgcggtcgtttgtttcgatatagccttcttcattcgtaatgcccaggttttcaaacggtttagacagaggaagcatgccgatgtaaatgaatacgccgtctgttttgaattcactttcttcaccggttaccgtatcgacaagcgttacgttaccgactttgccgttttcctcatgaatttccttcacagttttgttccataggaagtcaactttttcattatcaaatgctctcgcttgaagaatactttgagcacggagtttatcacgtctgtgaacaatcgttacttttgaagcgaaacgagtcagatatacgccttcttcaaccgcggaatctccgccgccaacaacgacaagttctttgcctttaaagaaagcgccgtcacatactgcacaataagatacaccgcgtccgcccaattctttttcgccaggcacgccgatttttttatattccgcacctgcagcaatgatgacagcacgggctttatattcctttgaaccagctttgactactttgtactctttgccgtcaatgacctctttaatatcgccataagcgtattcagcgccgaattttttcgcgtgttcaaacattttgttagaaagctcaggcccaaggatactttcgaatccaggatagttttctacatcttccgtattggccatttgtccgccaggaattcctctttcaatcattaatgtcgataaattcgctcttgatgtgtatacagcggccgtcatcccagcagggcccgcgccgattataatcacgtcataaattttttcttctgacacactattcactccttaaaccatcttttcaagtttgggctctttcttataagataagaatccccatcaaacgtattccttacccatatcctataaaatctcatggtgatacgctatttttttgctcaacacgattaaatgtattcgaaaagggtatatgttaataaagaaagagccttctgtttatagaaggcccttgtcatatttattattgaacaacacgtcttacaacacctttaaatgctgctttccagtaaggattgctcatagagtcaacagatacgccatgagatgtattgtcgtttaggaaagtaccgtttcctaagtagattcctacgtgtccatttgttttgtaagtgtcaaagaacacaaggtctccgcgtttcatttcagacgcgctgacagcttgtcctctgccaactaacgtatcagttgttgttccgcctacaggtccaaggttaacacctgcagaagcgtatgcccagcgtacgaatgatgagcagtcaaaaatacggttgttgatatcagactgagtgcgtccgccgccaaacttgtacggagattgtcctacaatgcttgaaccaacgctgatcgcgccttcaattccgccagagttgctgataacagtgccgcctgaattgctgtttgagccgctgctcttcttagaagatgagccgtttgacgaactgtttgatgaaccgttagaagaattgtctgaagaattgtctgaagaatcatcagatgagcttgcttttgatgattcagttgtcgccgtttgactgtcatctgtttgtgtttcatcagatgctttttgtgcttcttcctgctttttgatcaaagcagccgctgcttcttgttcttttttgatgcgtgcttgttcagcttcagtatttgctttttgatttgcaagttcagacgcctctgattttaattcagaaatcgctttagccgttttcttttggcttgcttttgcttcgtcgaaaagcttgtctttttcattaagctgtttatcaaggtctttttgcattgtttctaatttagccaaggcagcttgaacttctttcagcttgtcattcaaatccgcttcagaatcttcgagcttcgctttatcctgctcttgctgtttgattaaatctttgtctgcgtccacaatagatgaaaccgcagtcgcacgagagataaagtcaccaaagcttgttgatcctaaaagaacatctatgtatccttgagatccgccgctttcctgtaaagaacgaacgcgttttttcaggatttcattgcgtttttcgatgcgtgcttcagtttctttaatctcttttttcagttttttgatttcttcttttgttttatcgttttcttcttttttatcttcaatcttgttgcttgtatcaagcgccttatcgttaatgtctttcagttctttttcaatctttgattgattttcctgaagctcggttaattctttttccttcgcttcaatgctggaagcaacctcagattgcttgctttcgattttttgtttcttttcatctaatgtttccgccgatgcagttttacttgtaaatgggatcaaaaaactgcttgtcccgatgacggaagccaaaccaagtgtaattaaactctttctcactttttatatcctcccttttactgtgaacctgtcctcatttggaatcgtattttgaacatcaagtttcgttcctcatactctacgaggaatgatggttgtttatggttaattattctgtgcatctcttattctggttgtatagcgtttatttcacatcatatgtaaaaaacactaattccttatgtacgagaatcattataccatcaagtttcgacaaattagcgataaattttattacatttatgtttcaaacagatgtcaagtcacacatcatttgtcatttttcttaagcgtgtaaaaaaactgtcgatattattttcttaatataatctatctaacaaaaaaagagtcgattaaataaatcaactctttaaaatttactattctagaatatcatcaatatatttcatatatttcgtcaaagttgccggagagatgccgaatcgggccgctgtgtcttttttcgtgtcttgcttgccatgggcttctttccaaatataacagatggctgctgcccagcctttctcattcttcaacggagcagctgcacgaatttgctggatgacatgaaaaacccagcagctcatgacttctgttttcatctcttctttttcagcttgctctaatagtttgaccgtttgataagcgaaaagtgcatcctctgaaacgtcagcagccgcagaatctccattcagaagcagctttacaaaatgagtttcaaaaggagcggtaattctctttgagcgtatcaccgcttcaagatgctctgtttctccctttgtgctgctgatataataggctgcgagtcgctgctccacagatgaaggaagagcttccctccgctcaatccaaggcgccgggcggtcttcgccgggatattgcgactcgacttttctccagatcgtctcggcaaagtcggtatgtcccgtaaaataagcagagcaggaaagccagtaaaagaaggtgtcgtcaccctcaaagccggttttatataatgatttgagccatttatatccgatctcgtagcggccgacaagcgccaaagtagcacccaatttataacgctgctccaatagcatcggatagacattggagagctgatcactcaattccgccactttttcgtcttctctttcataatagtagaaaacgagaagattgcataaggcgtgaagatttccttcattatgagaaagcacttcataagcggtttgcttcgcttttacaacgtttcctgaatagaaataggcaagcgcgagattgttgtatgctgaccaaagctccggatattcagttgtgatttcctcaagcgccgcaaccgcttcagcaagctggccgctttccagcaatgactttgcccgatcctgtttcaccagcagttcatcctgatcatacaacgaatcctcaatgccgtcgtctcctaaatcgagcaaatcaagcagactatcgttttcttcggcgaattcaccatccgggtccgcatcagaataagcggccgcttctttataagcttcctggaagagccccagatgggcaaagttattcgctttaaagtaatggcactccggcatttcggcctccagatttgccatgatatagtcaagaagatcgttcgactcttgatactggcccatttccgaataaatgaccgcaagctgtgaaagcatctctgaatcctccggctccaaatgaaccgcgcgctgaatcagtttgcttgcccgttttagattgcgctctttatacgctttcaagcctttatgaaaaaaatattgtccatcttgaagcagctggacaatttgtgcgtgatttttatgttcagaagtgtgttttcccacaactaccctccgttttatacaatattaccgtcagtagtataccataaatcgtaagcccctcaatagttcaaaaggaaggattgggaaaatccctcctcttttttattggctgattcgaccaaaatttacccggctttgttttctaagtccgcattcattttcagctgctgttcagcaaaatcccggtaaaggccatgggaagccattaactcatggtgtgttccacgaccggtaatttcccctttttcaacaaacaaaagctggtccgcatctacaacggtagataggcggtgagcgataacaatcgttgtgcggccctccatcagcacctccagcgcctgctgaactgatttttcagattggctgtcgagacttgaggtagcttcatcgagcataagaatgcttgggttacggagaagcgctctcgcaatcgcgattctttgcctttgtccgcctgacagcataatgccgcgttcgcccacttctgtatcaaactgattcggcagctcctttataaaattgagcgcatatgccatctccgcggctttttcgatctcagcatccgtcacatctcgttctaacccgtagcaaatattttctctgattgtcccggacattaacgggctttcctgtgatacatacccgatatgctccctccacgattcaagcgagtaagtatcgaccggctcgtcccccagccgaatggtccctgcagtcggagaataaaagcgttcaagcagcttaaacagcgtcgtttttcccccgccgctcggaccgacgatcgctgtcactttccctgcttcaatgacggcgctgacctcttttaagatcagctgatcaggcttatatccaaaagacacgcgatcaagctggataggcagatgtgcattttcaatttgttttcctgtcactgtatcttcctcttcctctgccaaaatctcaatcattcgttctgttgcaccgattgatttttgcagctgtgtgaaaaacgttgtaatctggcccatcggcataataatttgaaacaaatataaaataaaagccacgagcgctccggctgtgagctcgcctgatgagacctgcatgccgccatatccgatcactgcgacaagcgctgccattaacacgagtgaaataagcgggccgacaagcgattgaaccttggcttcacgaacgccaagcttaaataatgaggaaatccccatcttcccgcgcccatattcgacatcctccgcatttgaagccttaacaagtctgatttccgggagaatttgattaagcaggcctgtaaaacgagccgtttcatcttgcgtttcccgtgaaatggagaacattttccgtccaatcggcaccaaaataagagcggccagcggaacgaccactaacacaagcagtgtcagcttccagttcataataaacaagattgtcaatgatccaatgacagaaatgatgcctgtaataaatccgctgatatgggttgtaatcaattctttgaccaccatcgtatcgttcgttacacggctgactgtttctccggaagcatttgtatcgaaataagagacaggcagcttaattaatttcttccataataactcccgcagcccggaaatgattttttgtccattatagttaagcgcataggtggcataagcgcttaaacccgcctgaacgaaaaacaccagcgcgatcaaaccgatttgcgtgcctgacagatttgacatagaaaaaccatcgacaagctgcttcgttaataatggaatgagcaggctgaccagcgtggttactacactgagggcaagcgcaaaggcgagctttccataagaaggattggtccgtcttactaaggcaaaaaagggtttcaatttacttttagatttttgtttcttggttggcatatattttcctcctgtttcagcgttcagaaaggtgaaaagtcatagcaaaaggatgatttttactctttctcaatcatatcaatggagaaagactttttcagtatatttttgccgtgatcaaaataaaaatctcccactcattgtttgaataggagatttttgtgttagacatctttcactggcttcttttttctgtaagtcaatgttacatcctgctgtcgcaggtcttctattatcattttgtaccgatcaacttttgcggtatgttcttcttttatcatctgaagggcagcttttcgtttttcgctattagactcaagctctttttttatttttttacaatcaaccctttttgccctttgatttcctcttttaatgaagactcaaatttctttgtcaggctgagaaagtcgttgatcggttgattgagggtgcccgctttccccttcatttcatcttgggtaagaaacatataggtcgttgatacaatttctgtttcactttctgaaaataaggaagtcactcttcatattcctcctaagactgaaaatcaaataactgagaaatcatttcttctttttcaaacagcttttcaatactctcgcggatatttttgataaaatctcttttttctgttgtctgtttttttaattcagcaacaattccatcatttgcaggaagcgcacctgtgtggaatgattcatgaactgagattttctccaatttatcgaatgtgtggctgaaaccagctgcaagccggaattgaagatcgaaggcataatgcgaagggttttcttccatatgatgaatagccgtgatgatcgcctgctttttgtctatgaagtcttcatcgatttcctgactgtaaaccttctggtacttagaaatcgcatcttccatatcttcaacgattttcataccgttttgatagattctgacagcggatgagagattgacttgaatcgtttctcccgagccactcttccctgtaaaataaatatcggagcctttatagctgaagcctttttcctttgacaaggcgttgagcatttgaacgatgctgtggccgtcgacgataagttttagtgcgtcttttgtttctgtgtcgagtgttttcaatgaggacagaattgattttacatagtccactatttcaccaacgtcttttaaagcttgcataaattggccatgttttagatggtctatgaaatgttcgtaccgtgactctatgcctcgcatactcgcattaatattcgttaattcttttttgatgactttcttttgcgtttcatcaatataaccattttcagctaactgatctacgaccggtccgctgtttctcaacaaggtatgaagaaaacctaaaaacgacggcagttcctcttttattcggccatacatttgcttaacatcatcaaaatgctcatataggacacttactttctttaaagcgccgtctgtgtttttcactttttcaatcaggtctatgtctatcccgctggctgcctttataaaaccgttcaagccgtctttttcatagtcatccttatatttttgaaggaatttttgaattgacctcacatcttcgtcaggaaccccatccataatgtttcggatgccttttacacttgtatttgtatctgccatcttcacatcaccgaatgtaataaaatcggccttgccgctgactccatacagcgggtcatcttttgagatgcgctgagtgatgtttgttgttacgcctttgtcttcataatatttttggatttctttttttaacttttctggcgggatggaatctatatcttcatatttataactaaatttcctaataacatatctatataaactttcatcagtttcaagtaattgatcaatattgacttgagctccatttaccccataaacttcatcatattctccatcaatcaattgcaccataacttggttattatttgcaagtgaatgtcctaaggcgaatgtttttaaatcctcagagttacctgctgctttctttgctttgttagtaaactcctttgtagcctcatactgactatgatcaattcctaaaaaaagaccaaaaaagttatatgaccaatccttattatcggcactaccttctgaaataatctgaagctgatcaatatgttttttctcatctattatatggattgccgttccatcgtaacctgattctctggtcgaactttgtatacttgtattctgatttacaagttcattggaggtgtaaatttcaattttcatattctcaggaagatcgtggtgggtttcctctttataaattctgcgtatatctgcttcgaaatccttcttagctttcttaacttcactcgcaatagttgaggcaaacttttgtttatagtcatattctaaatcaattaaccttaactttacgttctcattctcaaatacatttttatttcccatcttatttctcctttttatctattaaaaaggtgatagaattaattaatttctcaactttatttttagccttttcttcatctaaggagcatggttgattttcatttttgcatccaagggtaaaggcgtattctactcctaggttatcttcctctgtagacttaacatatccaaaataactgtatgaataattatattttctatcaatatcgtcaaagatgtcttttttcttggcagtgtaaatatccgttttctttttgctgctttttttgtattcgcctttataatcattttttccactaacaatatctagcattgtcttaggttcattcgcaaaactttcttctttgtaatatgttacatggccatcaaacattacattggtgtctttatcataactattaaatccaatactttctttgtttttcccggttaacgatgatcttcttgatagatactttccatcctccggaaacaacatcctaaaccctttcagcttagattccagcaaataatatcctggttcctcttcttttgttgacaccatgtactctctcgttttctcgtcctgaaacgcaggtacttgaggcagatccttgggatccatgtcttttggttttaccgcttctgttttattgtcatttgtgctgtttttatcattgtcattcatactgcatcctcctgtcagggcaagtaataagctgaagcaaataaagatgatctttttcattacgaacctccacgggttttgtgagaatagtattctatttttatatcaaaaataattctattgacctggttaagagatgattatttcatcctttttcatgttacatcatggcggaatttggataaataggaaatgagactcggttttgatctccttttattaactaatcatatataacacccaatataaatctaaatacctattacttttttcacaaaacaaaaagagccgtatcatccggctctttactcttcaatctcagaatggcgttttttcaatacgtcaagcacatcatccagcggcagggattgttctctgagcaggacaagcaggtgatacagcaggtctgccgcttcccatttgagttcctcatgatcccggtttttcgcggcgatgatgacttcggatgcttcttctccgacttttttcaaaatcttatcgacgccttcacggaagaggtacgtggtgtaagctccttcaggcatttccgcttggcgttccgcgatcacccgctccagttcgttcatgatgccgaatcggtccgcggcctgttcttctgtttgttcctttgtaaaacagctgtagctgccagtgtggcatgccgggcctgacggttctacgagtacgagcagcgcgtcttgatcgcagtcataccggatacctttgacggcttgcgtgttccctgaggtttctcctttatgccataacgcttggcgtgagcggctgtaaaaccatgtttccttcgtttccagcgttttttcgtacgattccttgttcatatacgcaagtgtcagcacttctttgcttgccgcatcctgcacgatagcaggaattaatccgtcctcgttaaaacgcagttcatctgcctgtttcatctcacattcaccccgtactctttcaagtatgatttcacttctttaatcgatgtttctttataatgaaaaattgaggcggccagcgcggcgtcggcttctccttttgtaaaagcctcaagcatatgctgtgcgtttcccgcgcctcccgaagcgataacagggacggggacagcttcggaaacaagctttgtcagcgtgtggtcgaaaccttttttctcaccgtcggagtccatgcttgtcagcaatatttctcctgccccgcgtttgacgccttcttttgcccacgcggtgacctcccaatctgttttctttctgccgccgtgcgtgtagaccttatatgtgtcagattctttgtcatacttggcatcaatggcaagtacgatgcattgagaaccgaaaaactcggctccttctgtaatcagctcagggcggagaacagctgccgtgttcaccgacactttgtccgctccggcacgcagtatcgttttcatatcgctgagctgattgatgccgccgccgactgtaaacggaatggcaagcttcgcggcaacctgctccacaacgtcaaccatcgtctttcgtccttcgtgcgaggcggagatatcaagaaaaacaagttcatccgcaccttcccggtcgtacacttcggcgagttcaactgggtcaccggcatccttcaattcgagaaattgaattcctttgacaacgcgtccttctttgacatcaaggcatgggataatccgttttgtgatcatttgcgcttcaccctttcaagcgcctcactcagcgtaaactgattggtatacagcgcttttccgatgatcgctccagagacgccgtccgcctcattgcgggcgagagcttcgagatccgcgacggagctgactccgccggaagcgatcaccgatttccccgtttccttagcaagctcgaccgtgcttttaacattggggcctgacagcattccatctgtcgcgatgtcagtaaaaataaagacttccgcaccttcattggctagctctttgcccagttcagttgccttaagggttgatgtttcaagccatccctctgttgaaacaaaaccgtttctcgcatccagtccgattgcaattttctcgccatattgtttcagcatttttttgacaaacggagggttagaaactgctgagcttcccaggatcacccgctcgactcctgctgataaatattcatagacgtcattttcagaacggatcccaccgccgatttcgactttcaggttcagcttttgcgcaatctcaatcacatggcggtcattcactcttttcccttctttggccccgtcgagatcaacgagatggatccattcggcaccctctttctcaaataactcagccatgtcgtacggtgaatcgccatatatcgtttccttattataatccccttgaacaaggcgaacacatttgccgtttctcatatcaattgccggatataatgtaaaagcactcattttttcaccttctgttctgctgccattttcgtaaattgggttaaaatagacattccgaccgtgctgcttttttccggatgaaattgggcgccgaagacgtttctttttccgactacagcaggcactcgtacaccataatcggcgcttgccagaagcgcgttctcctccatcccgtcaatgtaataggaatgaacgaagtaagcgtagccttgttctgttttagtcagcagcggagattcattatgaaaagaaagacgattccagcccatatgcggaaccttcagcttgtttcctttttcatcttctgctttcagcctgactgcttttccttttaacagcccgagtcctgaagcggtgccgttttcttcgctttcttcaaataaaagctgcatgccgaggcagatcccgagaagcagccttccctctgagaccatatcgtgaatcaattgatcaagcttcgtgtagcccaaattgtccatcgcgtctccaaatgaaccgactcccggcaaaatgaaagcatcagcttctttcagctcctccggcttttcagaaacaaaatacggcacgccgacacgttcaagcgcctttgagacactgtataaattccccattccgtaatctatcacgccgatcatttacagcatccctttcgttgacggtattcctttaactcgcggatcgatcgttgtcgcttcatcaagcgcacgtcccagtgctttaaaaacggcttcaatcatgtggtgggtatttgttccataatgaacgatgacgtgcaggttcattcgagcttcgagcgccagcttccacaaaaattcatgtacaagctccgtatcgaaagttccgactttagcagccgggaaatcagcgcgcatttctaagtgcggccggttgcttaaatcaatcacaacttgagcaagtgcctcatccatcggcacaaacgccgatccgtagcgtttgattccttttttatcgcccaacgcttcgagcagcgcctgccctaagcagatgccgatatcttcagtcgtgtggtgatcatctatatcaacatcgccttttgcgttaatggaaagatcaaattggccgtgtttcgtgaataaatccaacatatgtgtcataaacggcacatctgttttaatatccgcttgtcctccgccgtctattgtaaatgccagctcaatatctgtttcgtttgttttcctgacgcgttccgcttttctcatttagaaatcctccgttctctcgcttcaattgatctggcatgggcttctaacccttccagtctggcaaaagccgcgatgctttcggcatgttcttcaaaggctgattgactgtaagaaataatgctcgatttcttttgaaaatcagttacgtttaatggacttgaaaatctggctgttccgtttgtcggaagcacatggttcggtccggcaaaataatcaccgacaggctcagggctgtatctgcctaagaaaattgcacccgcatgtttgatactgccaagcaaagcttccggagactgtgttatgatttctaaatgctctggcgcgagtgtattgacagtctcaatcgcttctaccattgtttccgccacatatatacaaccgtaatctctcactgaagcttccgctatttctcttcgcggcaaggtttccagctgcttattcacctcggctgaaaccgtctcggccagcgccatggaatctgtgacaaacacacatgagctaagcttatcgtgttccgcctgtgacagcagatcggctgcaatttcgctcggaatcgctgtttcatcagccagcacgacgatttcactcggtccggcaatcatatcgatatcgacatcgccgaacacttctcgtttggcaagcgcgacataaatgttgcccggacccgtgattttatccaccggctcaatggtttctgttccgtatgctaacgccgcaatcgcctgagcgccgcccattttgtaaatgtcttttatgcccagctcggctgcagcaaccaaaactccaggagacagcagaccgtcttttcccggaggcgtgacgagaacgattctttcaacgcccgctacgagcgccggaatcacattcatcaaaacagatgaaggatatgcggccgttccccccggcacatatacaccggcggaatccagcgccgtcactttctgccccagcattgtgccgtcctttctgtgataaaaccaggaggattgcagctgtctttcgtgatattccctaatattttcgattgcctgcctaatcacctgaagaagacgtgaatccagtgaggtgtatgcctcctcaaattcttcttttgtgaccagcgggctgtctatttcgatgcagtcaaatttcgccgtgtagctgcgaaccgcctgatcaccgtttgctttaacatcttcaataatggaccggaccgtctttctttgctcttccgttccggcatcgatggaacgcttgagagaaagccgttccgctccgctgatggttttgatcttcattttgccgtctctccttccacaacgagagataggcgggatgccatttcgtcaatcacatcgtctttcatgcgatagcttaccgggttgacaataaagcgagaggtaatgtcacaaatgtgctccgtttcaacaagcccattttctttcagcgtctgtcctgtggaaacaatgtccactatccgatctgcaagcccaatgagcggagccagttcaattgaaccgttgagcttaataatctcgacttgttctccctgctctctgaaataactggaagccacattcggatactttgtcgcgattcttggcgctactccgctccagtctgtattcggaagtccggcgacagctaagtggcatttgctgatgtttaaatccagtacctcatacacatcgcgttcctcctccagcatgacatccttgcccgcaattccgacgtctgccacgccatgctccacatacgtggttacgtccatcggcttcgctaatataaaccgaagattttcctccggcacatcgatgatcagttttctcgaatcttcaaactcctcagggagcctgtagcctgcctgcctcagcagccctgccgcttcttcaaatatccggccctttggcatcgccattgtgagtaacttacccattttgctcttcctttctggcaccgataaaataagtgacgtttgcaaaagattttgtcatctggtcgatattttctattcccgataaatcttgaagaaccactttgttccctttcatgcgttcttcattcgcataagcgatggcttgcgcccgctgctctttgctgaaaataacagcgtctatttcacaaggttcgtccttcatatgaagggcttcaatcagccggtcgatccgaagcccgaagcctgttgccggtgcaggtgaatcaaaatggcccagcagcttgttgtaacggccgccgcttccaatgacaaaaccgacattctcggcgtacacttcaaataaaatccctgtgtaatagctcatgtggctgaccatattcagatccaggcggacattttccgtacatccgtaatcctcaagaatgtcccacagcgccttcagctcatcaaccacgctttttccttgcgcagaatcgacgatttcctcggcacgtccgcatacttctataccgccccgcagttcaaggagctcaagcagcctgcttttatcaatggaggaaagcgggagagacttgacatgctctctgtagccgacgtagttcttttcatataagaacctccgcagcacatcagctcgttcaacgtttccgagcacctcaacaaacaaagcatccgcaatgccggcatggccaattgcaattttaaaggatgccagcccagcgttttttaatgccccgacgactaaagcaatgacctccgcatccgcgctcgtcgtgccgtcaccgattaactccactccgacctgctcgaactcagccggacgtccgccttcacgctcctgagccctgaatacatttgccgcatagccgactcttagcggatgaccgtgtttcagaagcttcgatgccgccacccttgcaatcggccccgtcatatccgggcgaagcaccaatgtcttgccgtcctgatcaagtagcttaaacagctgctgctcttcaattgctgactggacgccaacggtatcgtaaaactccagtgtcggcgtttccataaattgatatccccatttatcaatcaaatcggttaacgatcgtctcaccttttttttcgtttcgtataaaccgggcagtgtatctctcatgccgtgcggtttttcaaacataaacatcaacccgagcacctccgctgttatcttatgaaggaaaattccgaatcctttagttcgctaatatgataatatgttagcagatgaaagaatgaaaatcaacgcttaacttcagtaaggatatttttagttcaaatatccttctcctcattatgaaaaaatcatgaataatgtattaaaggtacgtaatatctcaaattctttatgtttggcatgctataatacaaatcaaatagagaacaaggagataaagatgaaaacactgcgaactctatgtgtcctgatgattctttcaggcgttatttttttcggacttaaaatagatgcaaaagatatagatattccttttttgaacagccttaaaaaagtggtttctgatagcgatacagactcagctgcgaatagcaaaaaggagctgaagggaagcgcaaaaccgctggatgtcatcctttacaatcaaatggacgcaccccggctctataacggctgtgaagtaacaagccttgcgatggtgctgaattatgcgggatacgacgtgacaaaaaataccctggcaaatcaggttgccacagtgcctttgacatacagcagcggattaaagggtgatccgaatgacggatttgtcggggatatggcgaatggccctggtctcggtgtctaccatcgaccgatctatcagctggcgaaaacctatgcgggagacaaagtgtctgatctgactggaaaaagtatttccgctgtttatcagcagcttgaaaaaggcaatccagtttgggttattacgacagccaactttacgccagttgacaacatgcagacatggaaaacgccaaacggaacgatagaaattacgtacagcgaacacagcgtcgccgttacgggatatgatgataaatatgtgtatctcaatgatccgtatggctataaaaacagaaaaaccgatagaacaagctttgaaaaagcgtggaaacaaatgggcagccaggccgtggttattcaaaagtaaacacctgaagcctcactatgctctattctgagcaaatacgacaatattcatgctttttgtatcaatcggtaagatcgattcattttccatttttcacccaaaattgtctttactttcaggctgtctgtttttatgattaaagcagattcagccttgccccgatctatgcgagagaagccggtgcaagtcgctgacgcttctcttgcaaaaaatgaaagatatccggggaggatttatcattgaaaaaaatcgtgtctatcctatttatgttcggtttggttatgggtttcagccagtttcagccatcaaccgtttttgcagctgacaaagtggtgcacgaaacaattatcgtaccaaaaaatacaacatatgacgggaaaggacagcggtttgtggcagggaaagaattaggtgacggaagccagtcagaaaaccaagaccctgtttttcgtgtggaggatggagcaaccctgaaaaatgtggtgcttggtgcacctgcagctgatggcgtgcacacttatggaaacgttaacattcagaatgtgaaatgggaagatgttggtgaggatgcgttaacggtgaagaaggaaggaaaagtgacgatcgacggcggttctgctcaaaaagcgtcagataagatattccaaatcaataaagccagtaccttcacagtgaaaaatttcacggcggataatggcgggaagttcattagacagcttggtggttcaaccttccacgttgatgtgatcatcgacaagtgcaccatcacaaacatgaaggaagcgatattccggacggacagcaaaacaagcacggtcagaatgacaaatacacgctactctaatgtcggtcaaaaatggattggtgttcagcatatttacgaaaacaacaacactcaattttaacaaaaaaagtccgctgatgttattcagcggactttttcaatctttcttgcatttcttccttcgtatagatgatcctcatcggatttccgccgacaaatgccccgtcaggcacatccttatggacaagcgttccggcggacacaactgcgccatctcctattttcaccccgggcagaatggtcgtgttggcaccaatcatcacttcgtccccgatcagaactttgccgatccggtattcgtgaatcaaatactcatgggccagaatggtcgtattgtacccgatgattgtatttgttccgactgagatcttttccggaaacatgatatctggcatcaccatgagggcaaaggatgtctgttttccaaccttcatccgcagaaatgtgcggtacagccagtttttcatccctataaacggcgtatatctcgcaatttgaatgacaatgaaatttttgacgacctttaaaaaaggtaccgtttgatagacatgccacagtgagttggcccccgagaccggatgacgatctgtttttctcacagattacttcactccaacgatttgtaatagatcactcattttctcaagcataaaatccggctcatgcttcgccagcatttccggccctttaatcgtccatgcgactcctgccgtttttgtaccggcgtttttccctgccagcacatcatggtaattatcaccgaccataatggcttccgccggctcgcttcctagctgtttcagcgctaacagcacaggctcgggatcaggctttgcattcgtcacatcatcaagggtgacaactgtttcaaagaattcgccgattcccgtgagcttgaggcccatattgacagtatctcttaattttgttgtcacaattcctaatgtaaagccggctttttttaatgcatccagggtctcatataccgtttcatattcagtgacgagtgaatcatgcatgtcatgattgtacgctctgtacatagcgatcatatcctcgcatttatcagggtccatcgaagagaacgtatcaaaaagagacggcccgataaatgcaaggacatcttctcgtttatacttgctcggataataatgctccagtgtatgcaaaaaggacgcgataattaattcattcgtattaataagcgttccgtctaaatcaaacagaatcgtcgttacttgtttgtcactcatattgcttcctttccaaccgctgagggtttccattttttccacgtgtgcgcaatagccattgtcagcagaactgctgtggtgacacgaatcaaaagaagcggccagaccggtatgccaagcggaataaagacaagtgtatcttccacgaccgcgtggcaggcaacgagaaatataaatgccaatgtcatgtcccgcttgctcacgccgtcatcctcgacagctttgatcatgacacccgctccgtaggccagaccaatcgtcagtcccgtcaccatcgtcatagacgtatttttattcatgccaagcagctgcgtaaacggcgacagccacctggaaaaccgataaagccagcctaaatctcttaaaaactggatgataatcatcagcgggatcactattgccgccagctgcaaaacaccaagtccggctttcgttaatgcttctgccaacattcctagccagctgtctggcgccgcgctcttcgcagcgataaaaccgtactgcgccgtttcctttccgccatgccaaatgaggttgatgacgatggctgacacagcggccaaaccgatgcgcacggccaatatgacgccaattctgataccaacctttgcggcaactgtcgattcgataatcaagttatgacagaaagaaagcataacagctaaaataaagacttctttcacagataaatccaatgttaaaatcccggcaattcccgcatacagattcagcatatttcccagtacaagcggaatggccgcttcaccagaaagcccgaagagacccattaccggtgtgatcagccgtacaagccaatccatgacaggggtatgctggagcaaagtgaccaatagcgttaccgggaaaatcactttacccagcgtccatgttgtttgaaaacctgctgcaagaccggccagaaagatcttcttcatccctcatccccctttgttgacgtctactccgcgtaccgctccttcgagtatcccttgacgcgtctgaagatgatggctgccacagccaaaacaatcaatacgattgaaatcacctgagcgatgcgaagtgaatcagtcagcattaagctgtcagtccgcattccttcaataaagtatcttccgattgaataccaaatgatatagatcaagaacatctcgcctctacgcaaattcgctctgcgcagcagcagtaaaacaatgacgccgacaaagctccatagtgattcatataaaaaagtaggatgataatattgcccattgatatacatttgattgatgataaattcaggcaggtgcaggttttctaaaaaggctctgctgacagcctcgccgtgcgcttcctgattcatgaagttcccccagcggccgatcgcctggccgagcaaaatgctgggcgcggcaatatccgcaagcttccagaacgaaaggtttttcactctcgaaaacacataacccgttaaaatggcgccgattaatccgccatgaatggcaatgccgcccttccaaatcttaatgatttctcccggatgtgccgcataatagtcccattcaaaggcaacataataaattcgtgcgcaaataatcgcaattggaatggcaaacaggacaagatcaataaacgtatctttctgcagcccccgtttttcactttccctcatcgctatccacagcccgagcaaagcgccgagaccgataatgattccgtaccagtggacggctaacggccccagctgaaatgctatcggattgagtggttctatcgcttcattcatttaacgccaactcctattcttcttgttcaccgtcttcaatgacgtccgccagcttgttggtaaattgttcagcggcattcagccccatccgcttcaatctgaagttcattgctgccacttcgatgatgactgcaagatttcggcctgggcggacgggaatcgtcagttttgtaatttctgtatcaatgattttcatggtctcttcctcaagtccgagccggtcgtattgcttgccctgctcccagagttcaagattcatgacaatcgtgattcgtttattgcttctgaccgcgccagcgccaaatagcgtcatcacattgataatgccaaggcccctgatctcaagaaggtgctcaattaattccggagcgtttcccacaagagtatcctgatcctcctgccgtatttcaacgcaatcatcggcaacaaggcgatgccctcttttcacaagctctagcgctgtttcgctttttccgacgccgctttttcctgtgatcagcacgccgacaccatatatatcgacaagaacgccatgaattgctgtggtaggcgccagcctgctctcaaggaagttggttaaacggcttgacagtcttgtcgttttcagcggcgatctgaggacaggcaccccatttttctcggaggcgtcaatcagctcctgcgggatgggcatatctctagaaagaataatagctggtgttacatcagtgcacagagaatccattcgctgctttttctcctcttcaggaagctgttcaaagaaagaaagctctgtttttccgagaagctgcacgcgctccctcgggtaatatgtaaaatatccggcaatttcaatacctggtcttgataggtcactcattgtaatcgggcggttaattccttcttctccgctgattaattccaaattgaactgttccattacgtcttttgtgcgaacctttgccacgatatgttcctcctgttccgggctgccccgagcttgctcacaatactttcattttatcactttcgggcttgaacctaaaacagattttataaaaggggggaaaacacctcagctggtctagatcactagtctgaaaaagagtaaaataaaggtattcaaattccagaaaggcggatcatctatggcagagagtcttcttatcaaagacattgcgatcgtgacagaaaatgaagtaatcaaaaacggctatgtcggaatcaatgacggaaaaatcagcacagtttcaacagaacggcccaaggagccatattcaaaagagattcaagcacctgcggattccgttttgcttcccggcatgattgacattcatatccacggcggctatggcgcagatacaatggatgctagcttttccacgctcgacatcatgtcgtcaagactgcccgaagaaggcacgacgagctttttagccacaacgattacccaagagcatgggaacatttctcaagctttggtgaacgcaagagagtggaaagcggctgaagagtcctctttattaggtgcagaactgctcggcattcatttagagggcccctttgtttcgcctaaaagagccggagcgcagccaaaggagtggattaggccttcggatgttgagcttttcaaaaagtggcagcaggaggcgggcggactgatcaaaattgttacacttgcgccggaggaggatcagcattttgaactgatccgccatttgaaagacgaatcgattatcgcatccatggggcacacggatgccgattccgcattgctgtcggatgccgcaaaagcaggggcgagccatatgactcatctgtacaacgcgatgagcccgtttcatcaccgagagcccggagtgatcggaacggcgctggcccatgatgggtttgtgacagagcttatcgccgatggcattcactcccatcctttagctgcaaagcttgcttttttggcgaaaggcagcagcaagctcattttaattaccgattccatgagggcaaaaggactgaaagacggcgtatatgagttcggcggccaaagtgtgacggtaagaggacgaacagcacttctttcagacggaacccttgccggttcgatcctcaaaatgaacgaaggcgcacggcatatgcgtgagtttacaaattgctcttggacggatatagctaatataacttctgaaaacgcggccaaacagctgggcatctttgaccgaaaaggcagtgtgactgtgggaaaagatgcagatttggtgattgtcagcagtgattgcgaggtgattctcaccatttgccgcggaaacattgcatttatatccaaggaggctgaccagatatgaaagtaatggaatgtcaaacgtatgaagagctaagccaaatagcagccagaataacggcagatacaatcaaagaaaaacctgatgctgttctcggtttagcgacgggcggcacaccggaaggcacgtatcgccagctgatccgcctgcaccaaactgagaatctctcatttcaaaacatcactacagttaatttggatgagtacgccggactttcaagcgatgacccgaacagctatcacttctatatgaacgaccgtttttttcagcatatcgacagcaagcctagccggcattttattccgaatggaaatgcagacgatttggaggccgaatgcagacggtatgaacagctagtcgattccctcggcgacactgacattcagcttctcggcatcggccgaaacggacacatcggctttaacgaaccgggaacgtctttcaagtcgcgaactcatgttgtgacattaaatgagcaaacccgccaagcgaatgccagatattttccctccatagacagcgtgccgaaaaaagcactgacaatgggaattcaaacgatactctcaagcaagcgcattctgctgcttatttctggaaaaagcaaagcggaagctgttcgtaagctgttagaaggaaacataagcgaagattttcccgcatctgctttgcacctgcattccgatgttacggttttgattgatcgtgaagccgcgtcattaagaccttgaaaggaacatgctgacttatgaatatcaataaacaatcgcctattccgatttactatcagattatggagcaattaaaaacccaaattaagaacggagagctgcagccggatatgcctcttccttctgagcgcgaatatgccgaacaattcgggatcagccggatgacagttcgccaggcgctttctaatttagttaatgaaggcttgctctatcgcctgaaagggcggggcacctttgtcagcaagccaaaaatggaacaagcacttcaagggctgacaagctttaccgaggatatgaaaagccgcgggatgacaccgggcagcaggctcattgattatcagcttattgattcaactgaggagctcgcggctatattaggctgcgggcacccctcctctatccataaaatcactcgggtgcggctggcaaatgatattccgatggcgattgagtcctcacatattccgtttgagcttgcgggtgaattgaacgaatcgcattttcagtcgtcgatctatgatcatattgaaaggtacaacagcataccgatttcccgtgcaaaacaggagcttgagccaagcgctgccaccacggaagaagcgaatattcttggtattcaaaagggagcgcctgtcctattaattaaacgaacaacatatctgcagaacggaactgcttttgagcatgcaaaatccgtatacagaggcgaccgttatacatttgtccactatatggatcgtctttcataaaaaaagcctccaaccctttttaaggattggagacatggcgaaaatcaaactggtctggtgccggacgatatgtttcttttttcgtcttgaacttccagatcggtgatttcgttttgccgttaaaactgtcttccactataatgtaccaataataaacagactgcggttcaagatgatcccagcggaattcagctgtgtccccgctcttcacttgctcccgttttccgagctcttcattggtatatacgttacattcaaaataatcggtttccacctttttgattcttggcttcaaatcaagcgaaagggaaaattcatccttgttgccataggtatccgtatcatagtagttcttatcctttacatacggagagtacgtcgatacgtgcaccatgtcattggcttggtcaaattgaagcaaacgcaaatacccttggccgccttctggcccgccctgataatcggccagcatttgatgcacaagacgatccggtttcccatcaccatcatcatccagctcatctgtttttctcatcgcactatgataatgcccgctcaacaccatcacgacattcgggttcggctttacgatttctttgaatattttctctccgattgggcttctgtttccgctgaccagcaaatactcatgaaaagctaaaatggccatccggtcaggatgcttcttcagcacctgattcatccacgcgatgtcttcatccgtaatgccccatcccatgtacagcatgatataatcattgccgttgctagaaatcaggtcataatgtccgcggttatttttataggaaccgccataatgaaattttttatcaaaacgatcgctgccaaaatatttgccaaacgccctgtaggagccgtccttatgtccgacatcgtgattgccggccagcacgccgtaaggaattccgctcttatccagaacggacattgaccgatcagcgtttttccactgtctgatatcggcggaatcatctacaatatcacccgtgtggaacacatatttgatattgagctgcttttgattatcttttatccattcggtctgtttatcaaaaatatgcggatagctttcggcgtaatactgtgtatcagacatccagacaaatgtgtacatatccttcgcaggaggaatttcatcctgtacaatcacattcattttcgactcccgtacaaaatcggcggcaatcacagacgctttcagcgtaaacggtttgtcatccttcgcgacgaagctgtcaacaggctgccattcgtttgtccgataattccaagcatacatcgtcacctttctccccggcaaagaactgcccttccagactgattctgccagatcattctcatcaattgatggatcaaccgtcacttcaaagcgatgataagggaaaagctctttgttttctgtcgatactgtttttccatcagcagctgatacccgctccaattctttattcgtaaatggggtctccctttccggcacaaagcttttcggcggttcagtcagtgacgcgtgcttaaatattttcacatgattgcgcgctgtatattgaaatcccctataaaaaccaacatccatggcatcattcgtcggatctttcacccgtacagaaagcttggccttatgcgtgtcggcttcgctgtctataacctccggctggtccggatgctctcgttcggttttaaatatcctctcaatcactgttttattgcccgcgagatccgttgctgtcacttttagagaatgttttcccggcaaaaggtcagaagatgacgtatgatatgggagtgtaatgctttctccatctaacgacgcctccgcttcctcaattctgctccatttatcatacatatccgcctgcaggataaggtttcctttatacgtttgcccctcggtgatattcggctcaatgtgaggtcctgaattatctacccgtacaaccaggctgacattttccttcccgtcgcttgcttgaatatggtgagcgccttcagaaagctttgatgtatcccactccagcagctgtgatgtaaatagtccgtcaggcagattgaactgaaattgccagcttttattcgagcgctgattatcgccaataaagagttccttctcaggagacaccctctgatctctgatcaccgttccatccgataacaccaatcgggcgtttttgactaagaagtcatcacggttttcagccgtatcaaacggagacaccttcgaacctgaacgtatcgtaatacgctgcagctgcttccctttccgaagcagtgtctctggcaatggaacagaataggtgcggtatttatttgttgtatcatcgaacaccttcagcactttgccttccatcgttaccgcgtttttaaaataaaggttcgttttcctcgtatcgaatgcaaaatatacttctttttccatcgcgggctctgtcacttgttttttcccgtcaatccatagcttaatgctgtcagctcgcccttctgtcgtggctttgagaaattgagttcccgacagcgtgtctctgttttcaatattcatccgcagaccgtgcgccttgcttgtttgtttaatatcaatcattttgaccggcgttctcgcttcattgatcccgtccccggccgccacataatactctagctgatccttcccgatcaattcaggcgaatacacaatataatggaagagattatcgttgcggtctttttcagcaagaattcgcttaaacggtttgttctcatccgtccggtagtaaaaggccactgttttcactaggcttcggtcccgtatgtcagcccgcagctcaatgctttcagcagggcggacaggcttgcggtcagtcaaatcctcaatgaccggcttttctttatcgagcttgattttccgtttctggtcgggcacctgtgcctgtaatacggttccgggagacggattcttttccccgattgaaatgttcagaagttctgctgttccgttcagtggatacttataaagcactgatgacagccggcgcagcgcatgtttccgataatgcgcaaccgaaatgtcctttcctgtattcgttgatatcacaacggcccgcggcctcgtattggccataccctctgtctcgtctatcaccgcaagattttttccttcttttagttgtgtctgataataacgattgaaatccgctgacgtcaattctggatgcccggcaggcttcagccagacgacaaacgtttcgccggatggtatcaagatcctttcatcaggtctccaaatcagatcggagtcaggcccttcttttgggtagcggtaacggatatggtagtctttaaaatcaatcgttctgtcagtcgtattaaaaatctcaataaattcataaccgtctgcgcgtcctatattcttcgtatcaaccgccagctctgtgatcagaagctccggaatatgggcaaggtcagcctggtatccttcaagcttcagtttcttcgtctccgactcaacccgctgcttcccattcgacatcacaatgtaatactcaagctcgctgttccaaatcaaacgtttcggaatttgtgccaaaaacttgcggaccgctccgggggtcgggtccatcggcaccattttgtagcccagctcattactttgtttataaaaaagaaaggcggaaaatgcttgatacgaattatcgcgaacttgagcctcaatcattagattgcttctcatttcagctttcacatcaatttgaggaggattttcaagcaagggtatgtaatgaggcgtttgaaatagttcctgctgtacaacaggaaaagctttcgattcatgatggccgccagacaaaacggaaagaaaagacagtaatatagaagcaataaccgtgtatttcctcatcaaagcacctcccttttcatgtattttgcgtctgaacagggaagcttatgagttcatttttgtgcataaagaacaaaaaaacgtctgtctcttgaaaattccactattacccagtaaactaaggatagttaaccagttaacaattaaatcagagaggcaaattgatggacaacagcattcatgatgaattatttcaagctatacaacaattcgcattaaaaagggataaacgcgtctggcaaaaggtgcagataccatccattggcatatcctcacaacatcacgatcacctcaaaaaagactggactttgacccagcttcacattgtttcctgcatacataccagccaaaatgtgaacaacagcttcttagcatcccgtttacacatctcaaaagccgctgtttcaaaagcggttcatgctttgttgaaacacaatatcattacagtgacaaaaaagcctggcaacaaaaaagaaattttttatacgctaactgatagcggcagaaaattggcggcattacatgaacagcttcatgagaaagcaaaggagcaatataaacagcttttcaatgaattttcaattgatgatttaaaaacagtgactgcgtttttcaacttgtggatcaaatatatgtaaaaagagtctcacccgcatgggagagacctttggaattctattatgccccgtcaaacgcaacgagaagtgaaacaggtccgcgtgtatacagaccggactcagcataacaaaaatcttcctctaatctgatattccgcatcttatccagcacaatattagctacaatttcgatttcgtttttggcaaaagctgctcctacacagttatgaatgccggatccgaaagcgagatgccgggcggcgccgctaaaagcgctcttgataccaagatcttcccgatgaatattaaacacgtcaggctgttcaaatgcttcagggtcccggttagccgcaccgatcatacaaaaaacaatcgtatcttttttgatttccataccgccgaccactgtatcttgggacagctgccgcggaatcagctgaaccggcggtttataacgcaatgtctccgcaatggctctcggaactaacgaacggtcagccaaaacatcattcatctgctcaggattgttgagcaaatggtagatcatcagtgccagcgtcttatcagccggttccgttgcggctaacagcacattaagaatcagtgcgagtatatccttgtccgacagcgccatgccttcatattcagaagtacataggatcgaaattaaatctgatcccggattgacgcgacgttctttaatgaccggcatcaagtattgggaaagctgttcgctgcaccataacgaatgtgcccgcgcttcaggagattgagagatactcgtgataaaatcggcaactccgctgtgccactcagagattttttcatggtctcttttatccagcccgagcatgtccatcgtgacgcacaccgcaaacgtctttccaaaatcattgacgagatcacttttccctctttcaagataaggcgctaacaagttttctgcattttgtttaatcaatggagacagatgatccagtgcgtcaccgataaagcttctcactacaattcttcttttggcagagtgttcttttccatgcatttgggccagcacagggcctcgcatgactggttcggcacgctcaacaagtgatttcgtcgtgaagatatccggatgctgaaggatatagcggacatcatgatagcggctgataaaataactgtctatcgactcttcataatgaaccggatcttcctcccgcagttgtgaaaaataagcatatggattgttttgaaattgatcagaaagcacactaaacaatttaatcgattggctcatgttttactccccctatcatccttcagatgtgatccgtttctcagaaagcatctgcgccatttcctgtacaatgagatacccttgattcggccgcatacaaatagaaaattcatggttactgatcttctcacccagcttccacggacgatgataagcaaggagtgtctcttccacctctaaaatatccggagctccgataaaaaacggcagctcagctatgacatattccacagccaaattcagcatatcctcactgacttcttccatcatcaaactgacgccccgcgcacgcccgattatcgcttcacgagacatgtccaaacaagcatgtcgaaaatgaggctgctcaaaaaatgcatgttcaacttcttgtctcaacagctggtaggctttgttatctataaaatcagaaaatgtatgaatcgccttcggatccccgccatgagccacaagggctctttctgcaaatctcctgtttcgtgatacctctttccttacttttcgttcagcctttcctctcggagttccaagcgcttctagaagattagccgcctcatgccctgcaagtaaaactgaaacgcttttaaattgagctttcgcccatccaattaatctgtaaatataatcctctgaaaacctgctgttaaatgggctgatccccaccaaaacatgcctgcgccgttcaaatatttctctgcagttttctgttaatgcctcagcaataaaatgcacagaccttctttccgttaccattccggtcatctcattcacccctaaaacttatcccgctttaagtcatcaccctcaaatacaagatggaatagctagaacaactgaacaagacgaatggcaggcatcacttaaagtttccaaatgttttttaagattttaataatcattttcaatacccatatcatgataaatgtttactagtaaacattagtcattttatcccttttccttccaaacgtcaatatgatctgtgcccaaatatttgaaaataaatgtaaacatcacattttccacacactttttacacgcatattcagcatgacatatcaacaaatagtctaaacaccaacaattgacaacgaaaacaagaaaagataaaataaaattgttcaccagtaaacgatttgttttattgtttcatcgtaaactattattcctaagaaagaaggtagcctatgtctgatttgacaaaacagatgatatacgacatatacgtgagactgctgcaccttaatgaacaaaaagcgaacacttcacttcagcaattttttaaggaggccgcagaagaggatgtagctgaaattcccaaaaatatgacaagcattcacgtcattgactgcatcggccagcatgaacccattaataatgccggaattgccagaaaaatgaacttatcgaaagcgaatgtaacgaaaatcagcacaaaactgatcaaggaagaattcattaacagctatcagctgacagataacaaaaaagaagtttattttaaattaacccgtaaaggcagacggattttcgacttacatgagaaactgcataaaaaaaaggagctggctttttaccaattcctcgattcattttcacaagaagaacaaaaggctgtattgaagtttctagagcagttgacgtcaacacttgaagcagaacaaaccgatgggactccagacaaacctgtaaagtaaacaaaaaggcggtgtacactttggctcatacaaaatcaaaggcagtattgatcttatacactgtttgcttcagtgcattttttgcatctttaagccagaacatttattcacctattcttccgatcattaaagaatcattccatgtttccacagctatggtgaacctgtcagtctcagtttttatgattgtgacagcaataatgcaaattatattaggagcgatcattgattttaaaggcgctcggatcgtcttgattaccggtattctggcaacggcagcagccagcatcggctgtgcggtgactactgactttaccttgtttctgatattcagaatgatacaggcagccggttccgcagcactgcctcttattgctgccacaacgatcggacagctgtttacaggaaatgaacgcgggagtgcaatgggaacgtatcaaatgctcctgtctgtcgcaccggctattgctccagttctaggaggattcataggcggagcagccggatacgaagggattttttggatacttgcggccatctctatcgttttgctggtgacaaacagcatcacctttcctaaagattctccaactgaatctatgcagcaagccaaaggcaatgtgttcgctcattataaatcaatatttacaaatcgaacagggaacgtcattttgactttaagttttgttctctttttcatttattttgcagtaattgtctacctcccaatattgctgacagagcattaccatatagatgtgggtatagcaggactgttatatttgccgctggcgctgagcacgattgcaggtacgtttctgtttaaaagaatacaggcaaaaatcgggctgcacaccttgtttatcggaagcaatgtgattgccgcctgcagcatcattttatttgctgttacacattccgtttctctcgttctcatggctctgacgctggcactgtttggcatctcgatgggggttattcctcccttgtactctacaatgattactaatgaatttgagcacaacagagggagtgcaatcggaatgtttaactttatccgatatacaggcatggcagcaggtccgatggtatctgcctacttgctcacaatgatgccgtctgccatgtcctttagcctcctaggccttggatttgccgcattgagcttttgccttcttccgccaatgttttcgccgcagaagcgcacgaaacaaaaaaagcaccacatgtaaaaaagctgcctttgcgggcagctttttttatttttttctaagcggctctaaaatgcctttttgaatcagcaaatggaagaccgacaggataacggatgcccatatcgctgtgccgaagccgtcgatttgaaagctgtcacccataatggacgcggtcatcataagcgtgatggcgttaatcacaaacaagaagagtccaagcgtcaccatggtgaccggcagtgtaaatataattaaaagcggtttaatcagcacgtttaagatcgataaaatgaggctggcgataatcgctgccccaatgctgctgatatggatggagtcaatatatccatcaatgacgattaataacaatgcattgactaaaatgctgactgcccattttaccatgtcatttcatatccctttctgacgggacgataaaaatccaaatgatataaatgagcaaaaccggcaagacacttgtcataatggctaagatgacagttatgactctgaggagtgatgcgtcccaattgaaatattccgcgagacctccgataacaccggcgattttcttatttttttctgagcgataaagcttattcattcgatcacctctgtgagtactttagtttgatggcgcctgttagtgattctgagaagacggtgatgttttgatcatgtgcctgatttgaagtgaacatcatttctttttgaatcgtatcatttttttccttcagcatctctacatccattaattcatgggacagcgtaccaagattgcttttcagctctgccttcactgcgagatcgtccggaattgcaagctctacatttccagtcgttgtttttgcataaatggagcggcagtctgattctgttacgttaatcgcaatatttccgttaaagctttgaacgtcaatggattcgcttttccctcggagatcgatcaatccgttaatggtttccgcttctatcgtaccgcagctgtggcttgcgagcttaatttgcccgttggccgtttcagctatggctttttcggctgttaaatacgagaacgacagcacgccgtttgtcgttttcgctgagaactcttttacatgtaaatgttcccctctgactggaccgttaaacagcttcacccgaatcttatcatactccttctgaggaatatacaaagtgacattcgttttcatcgtctttttctcagtacggataaaaaacttattacctttgatttcacattcaatatgctgaagaaatgcgtgtctcgccgcatcctggctgtcagcgcgatataccttcgcctggcattccgctctgatatcgtcatcttcccaagggacgatatttacgctgccattggcaatttgcagctcaacactggaaaagtcagtatctttaaattgaaaaatgtgctgaacatcatacgcatggccaaagtttaaatcaaggtcaacttccttgacctttttcacagcagaatcaatccagtcaaacagcttggctcctaaagacggtttgccgctttctttttttgccgttgtaaatggctcttcctcgtcatgaacgtgaactgagagcgctgtgattttctcttctttttccttgtagtcgctgtcaagcttttcaatcagtgtcaaagcttcttgtgctgtaagctttccttcctcaacaagcttaaggattcgttccttttcttgcttcattacgatctcctccccattgtctacttatgctgcacgcaggaccttaatgccctgaatcacattccaaatgataatgccaatgacaactaagaaataaataaccgctcccccgatgattacaaatacaggaagcaagctgtctccatcaatcgcaacggctccgccaagtaaagcaataaaaaggaacagccagccgacaaacggaacaatgtgagaaataagagagcgtatcgcatggcgttttgtttctttctcatttacaacaaaatatgcgacaatcggcacaatgattggcgcaatgaacacactgaaataacaaagtgatgcaataatagcttgattacggttcaattcattccacactcctattgtgaattgtccatgacaaaagatcagggacgttttacttatttatacgtttaaaatctcttcaggtttcaaattcattctttagacatgctccgatttacggaaattggattttaaaaagttttagaagtagaatcttccggctataccgattacaatatgtaaaaagcttacggcaaccaaggaggctggacaagcaatggagaaagatcccagtgactatacagtaacacaagaatcagtgttaaagctgattcaggaacaaaaaagaatgaatcgtgaaatgatcaccgagcttgagcagattcacggacccttcccgatctctcacgatatccaatatataaaagtgctgctcgacagcagcaacacacatattgttcaagatttaatgagtgtaagtaagcagctgtataagaagactttgtaattgcggaaaacatatcattcattataactgaaacaaagctaaaggttagatgacaatatcttgccttttttgttttgaaaaaacaagtgattccctggctgtcacaaaatgattgtaacaaaaaaagcctgccggcacatccagttaatggactctgtcggcaagctgtaactatcagaaagagatagccgttcaaaattaacgtaacaattgaagcacgttttgcggctgttggtttgcttgagcaagcatcgcttgagaagcttgagaaggaatgttgttctttgtgaactcgctcatttctttcgccatgtcaacgtcacggatacgggactcagcagctgtcaggttttcagaagaagcaccaaggttgttgattgtgtgctctagacggttttgtaccgcaccaagtttagcacgttggtttgagacattgttgattgcagtatcaatactttcaagttgtgtatcaaaaggagtattagcaaaatctgttacattaagtgcgtttactcctaaagcagttgatgacatgctgtcaatgttaactgtaagctgctggccagcatttgctccaatttggaaagtgaaaccatcagtttcagtaccatctaataactttttgccgttgaattcagtacgatttgaaatgccatcaacttcctcaataagcgcatccatttcatctttaattgcaccaagatcttctgcttgttgtgtacctgtgtttcctgcttgaacagtaagttcacttctaaacctattatgccgtaaagaaaaagcttgcctgctaagcccaaggatggacttgccgacaagctgtcccctcttaacagagggttttaagatgtagctgtttcttttgctttcaagagcgatttcatgcgtgttttgtcacgttcgataacaggctttaaataacggcctgtatacgattcttcaacttcagtgatttcctcaggcgttccagacgcgacaatggttccgcctccggctccgccttccgggcccaaatccacaatgtaatcggccgtcttaatgatatcaagattgtgctcaataaccagtacagtgtctccgttgtctaccaaccgttgcagcacgacaagaagcctggcgatatcgtcgacatgcaaacctgtcgtcggctcatctaaaatgtagagcgtacgtccggttgagcgtttgtgcagctctgacgcgagcttcacgcgctgcgcttctccgcctgacaaggtcgtcgccggctggccgagcgtaatataacctaaaccaacatcataaagggtttggagcttgcgtttgattttcgggatattttcaaagaaagaaagagcatcttcaaccgtcatatcaagcacatcagagatgctttttcctttgtacgtcacttcaagcgtttcacggttatagcgtttgccgtgacacacctcgcatggaacgtatacgtcaggaaggaagtgcatttcaattttaataatcccgtctccgcggcaggcttcacatcgtccgcccttcacgttgaagctgaaacggccttttttatagccgcggaccttcgcttcatttgtctgcgcgaatacatcacgaatgtcatcaaatacaccggtgtatgtcgcagggttggatctcggcgttcttccgattggcgcctggtcaatgtcaatgactttatctaaatgatccaaacctttaatctctttatggctgccgggcttcgctttcgctttatgaagcttttgcgccagcgccttatgcaaaatttcattaacgagtgtactctttcctgaaccggaaacacctgtaactgctgtaaacgtcccaagcgggaacttggcattcacttttttcaggttgttttctgatgcacctttaatttcaatgtaacgtccgtccggctttcttctttcaggaggcaatgggataaactttttccctgataaatagctgcccgttaatgaatttggatcttccatcacttcttccggcgtacccgcagatatcacctgtccgccgtgaatgccggctcccggtccaatatctattaaataatctgctgccatcatcgtgtcctcatcatgttcgacaacaatcagcgtgttcccgaggtctctcatatttttcagagcgctgatcaagcggtcgttatcacgctgatgcagaccgatagacggctcatctaaaatataaagcacaccggataaacgcgagccaatttgagtcgccagcctgatgcgctgcgcctctcctccggacaatgtacccgctgccctgctcaatgtcaggtaatcgaggccgactttgtccagaaagcttaagcgctccacaatttcgcgcaaaatcaaattggcgatctgcatatccttctcagaaagggtaagatctttaaagaaggcaagtgcgtcggcgacagacagctcggtaattttcccaatgtggcggccgtcaatcagtacggcaagcgcctctttctttaaccgatagcctttgcacgtcggacaagacttctgagacatatactgctccatttgctcacgtatgaaatcggagcctgtctccttatagcgtctttcaatgttgcgcaatacgccttcaaattgaatttcaccttcgcggatttgtccaaaatcattttcatatcggaaataaatcaggtcatccccgctgccgtacagcactttatccagttgatgcttcggcaaatctttgaccggcacatccatatcaatcccgtagtgggtgcagactgcctcaagcagctgaggataatattgtgagctgatcggtgtccaaggggcgaccgcattctccttcaatgacaaatcttgattggggatgacaagatcggcatccacttcaagcttcattccgagaccgtcacacgtcggacacgccccgaacggactgttaaacgaaaacagacgcggctcaagctcaccaattgaaaatccgcagtgcggacaggcatgatgctcgctgaacatcagctcttcctcaccgatgacatcgatcataacccgtccttcacctaaacgaagcgccgtttccaatgaatctgacagccgggctgccacgccttctttcacgacaatccggtcaatgactacctcaatggaatgcttcttgttcttttctaattcgatatcgtcggaaagctcagccatctcgccgtcaattctgactctgacatagccttgtttcctaatctgttcaagcactttgacatgagcgccttttcggcccgagacaatcggcgccagcacctgaagcttcgtccgttccgggtattccagaattctgtccaccatttgctcgatggtctgggatgtaatctcaattccgtgttccggacaatgaggcttccctactctcgcatataaaagacgcagataatcataaatctcagttaccgtaccgacagtagacctcggattgcggctcgttgttttctgatcaatgctgatggcgggagagagcccctcaattgcatccacatccggcttatccatttgccctaaaaactggcgggcataggcagacagcgactcgacataccgtctctgtccttcagcatatatcgtgtcaaaggcaagggaggatttacctgatccggacaaacccgtgacaacgacaagctgatctctcggaatcgttacatctatatttttcaggttatgcgccctggctcccttcacctctatccgatccatagccatttgttcatcatccttccgcttttagctctaaaagtaaatcgcgaagctccgcggctctctcaaagtcaagcgccttggcggcttccttcatttcatgctccatctgttcaacgactttctggcgttctttcttcgtcattttcgacagcttcggcgcggcttttgttttgtattccgctttatcctcagctgctactgtggcacgaatgacatcgcgaatttctttatttatcgttttcggcgtaatgccgtgctcttcgttaaaccgctcctgctgctcgcggcggcgttttgtttcattaatcgcaatttccatagacttcgttattttatcggcgtacataatgacgcggccttccgcatttctcgctgcccgtccgatggtctggatcagcgaccgctccgaacgaaggaaaccttccttatccgcatccaaaatcgcaacaagggatacttcgggaatgtccaaaccttccctcagcaggttgatgccgacaagcacatcgtacttgccaaggcgcaggtcgcggataatttcaatccgttcaagcgtcttgatctcagaatgcagatagtttactttaatgccgatttcctttaaataatcggtcagatcctctgacatcttcttcgtcaaagttgtcacaagcacccgttcattccgctcgattcttgcttgaatttcgccgatcaagtcgtcaatctgaccttcgattggacggacgtcaataagcgggtcaagaagccccgtcggacgaatgatctgttcgaccatttcatctgtatgttcaatctcgtacggccctggtgttgctgatacatacacgatattgtgcatatgcttttcaaattcctcaaaacgaagcggacggttatcaagcgctgatggaagccggaagccgtgatccacgagcacctgtttccgcgcctggtctccgttaaacatgccgcgcacctgaggaattgtcacatgcgactcatccaccacgatcataaaatcgtctgggaaataatcaagaagcgtatacggcgttgaacctggaggccgcagagtcaaatgtcttgaatagttctcgatgccggagcagaaacccatttcacgcatcatttcaagatcatatcttgtccgctgctctaaacgctgcgcttcaaggagctttccgttttcatgcatgaccttcagctgctcctcaagctccttctcgatattttgaatcgccttctccattttctcggcccgcgttacgaagtgggatgccgggaaaatcgcaacatgatctcggtcgccgagaatttctcctgtcagcgcatctacttcccgaatccgttcgatttcgtcaccgaaaaattcaactctgacacaatgctcatcacgggatgccggaaagatttccactacatccccgcgcacacgaaatgtaccgcgctgaaagtcgatatcgttgcgggcatattggatgtctacaagttttctgagcagctcgttgcgctcaatttccatttcagtccgcagtgacacgaccatttcccggtattcctcaggcgaaccgaggccgtatatacaagacacactcgcaataataatgacatctctgcgctcaaacaaagctgatgtggcggagtgtctcagtttatcaatttcatcattaatactagcgtctttctctataaatgtatccgtttgaggcacatacgcctccggctgataataatcatagtagctgacaaaatactcgacagcattgttcggaaaaaattccttgaactcactgtaaagctgtccagcaagggttttgttatgggcaatcacgagagtcggcttattgacttctttaatcaaattggacaccgtaaatgttttcccagttcctgttgcacccagcagagtctgatgcttcttgccctcctgaattcctttcacaagcttttcaatggctttcggctgatctccctggggctgatatttcgagactaactcaaagcgatctttcacaaaaataagcctccgtttctttaacgaaatcttcctatagatatagtaacacaatggaaagcaaaatcactaaaaatacgaactaaagttcggtggttttttatttccagctgtttttgtgtataaaaaacctgcttttaaaacgtaaaagcaggtattcagtctttatattcattatgtccgatttattcttcttttttctctgcagcttttttggccatatacagtccgccagccacaagagacacaacatccaatcctacaataaaatacgtttctgtatagccttttaaataagaggcaaacagcaatgcagctgttaaagcgatcgccacataatgattaaaggtgactctagtaaatagaacaacaagcataaaagggaaaaacaatgcaaaaacggcttttgtaatcaacaaaaaccctcctcagggattcttcatctgatctgattatagtaaaaaatgaagaatcggacaatcgtgcattcgctccctctacttacaccataccccttttcagccaaaatcaatcaccatatttgcattttggtgccggtcaaaacttattccatggtgccgctgttctaatcagcggcactttttttattacatcatcaagtccgccgccagattccgagaataaaagaaaataggcatacagtaccagtacggccgcatttttcaggataatataaccaacttaactattcattttatttaggactttctgcgtttgacagcattttcctgaaaacctacaattaaatgatagtgtttactatcattttttaaacacaggctccgcaataaaaagactagagagaaaaacaaaatgaatgaagaaaagaggggtttcaaatatgtattctgttttatttcgccaggcagaagagtccagccagctggctggagcaaaaggaatgaatttgattaaattgaccaaacacggtcttcctgttccggacgggtttattattcaaacgaatgcgctcgcacgttttatggaggacaaccagcttcaagagactagtgaaaacgtcgaaggcgggatcatttccggaacattttcggatgagctgaaagatgagctgactagttccttttataagcttagagaatcatatcgatccgtagccgtgcgttcttcgtctgcttcggaagatttagaaggcgcctcattcgcgggtcaatatgaaacctacttaaatatcaaaacagaggaagagtttctggctaaagtgaaagaatgctgggcctcatttttttctgggcgggtcagcagctataagaaaaaaatgaacaatcaaatcgcagagccgttaatgggaatagtcgttcaggggctgatcgattcagaaatgtcaggtgttatcttcagccgcaaccctgttacccatgatgatagagagcttttaatcagcgccagctacgggttgggtgaagctgttgtttcaggaaatgttaccccagacacgttcattgttaataaatcttcgtttgagattcagaaagaaataggtgcaaaggaaatctacatggagtctgcggcagaaggaattgctgaaaaagaaacgagtgaagacatgcgcagccgtttttgccttacagatgaacaagtgattgaattggctgaaatcacaaaaaaaaccgaagacctgtacggatatcctgttgatatagaatttggaattgctgatcatcaaatataccttctgcaagctcgcccgattacaaccattgatcaggacaaaaaagcggcagaagaaaaacgcagcttcatgattaccgacactgatatgaatgatttctggcttaacatggagtctaatattgaaggtccggtgagtccgttattttcatccttcatcgtgccggcattggaatatggcttgaagaagagcatgcaaaagtttccgattggtgtagttgttgatgaagtaaaactttatcgcggacatatttattccaaaaaccaaggcggacagcagcctccttctgaagactgcggcaaagagcttttcccgattttatcggagcatatgtatgacatcatcaatcacacatacctccctttttaccggacactggaccagctcgcacaaactgagcataccgcagaaagcgcactggaagcttttcaaaaactaaaggccttttatctcacggcttatgaagagcactttaatatcgttttcccgcaaatccttttaacaaacaaactgcaagcgatgtatcaggacattcaaggagagtccgaaaacgctcatttttacgagatgctgacaggaaaaatgaacaaatcactggaaacggaccgttgcttatggctattttctgtggaagttcaggagaacccgaaccttctggccatttttgaaaacaacaagcctgaacagctccaggagaaattggaacaaacagatgagggaagacacttcctgaagaacgtccatgaattcttgcaagaatacggatggagatctgttaaaagtcatgatctgattgaacaaatctgggtggaaaatccgtatttcgctctggccaatattcaaaattatgtccgtaatggctatcattttgacaatgaatttcagaaaacaaaagaaaaacgagagaaattatacaatgaattcttggaaagcatagaagatcccggtttacgcaccgaatttgaccgctattatcaatggacactgaactctgcaaatataaaagatgatcaccacttttatattgacgccatgctggatgccaaggcgagaatctttctgctgaagataggtgaattgctggcggaaaacggtgtcattcaagatcgggaggacctttggttcttatatgacgacgaagtggaacaagcgcttcttcaccctgtatccctgcaagaaaaggctgaaaaacgcagacagatttttcatgagtatgagctggcccaagccccggcctacctcggcaccccgacaaaagaacagctcaaagcagctgaagaaattgtcggcgctgtgatagaggatgaaaaaaacacagagaatcatatttttggcattgcggcatcaagcggcattgcgacaggtccggtgaaaatcattcgggacgccaatgaattttctcaattcgcgcctggagacgtactcgtttgcaagatgaccacaccgctatggaccagcctgtttcaagacgccaaagcgattattacagacacaggcggcattttgtctcacgctgcgattattgcccgtgaatacggcattccagccgttctcggcacacgcacggcaaccgaaagactgcgagacggtgacatcatcactgttgacggaagcagcggcaaaatcacagttgtcagccggtcctgatgcgtccccctctttcttatacaagcggggcgggtgtatacttgtcctgccagtatattcgtgaggtgaaacgtattgagaccgacaaacaagagaatccttgatgctgccatgcagctgctcgtcaaaaaaggatatcgcgcaacgactacaaaagaaattgcagaaaaagcaaatgtaagtgaagcgacgattttcaggaactttaaaaacaaacaaggactagttgaggctttgctttctcagcattcttcaaacagaggcagcattttggaacaaacagaaggggatttgtacaaagacctgcttcatatcggaacctgtctcttggaggagctcgaacatagaaaagatatcattaaaatcagctttcgtgaaccggccatgtttcaggatgtcattaaccacgtcactgaatatccccaatctatgaaacagctattggttgattatctcaaaacgatgggtgagaaaggggttattcagacaggaaatgaagcggaacatgccgacgtgttcatgtcgattatcttcggttatttcattcaccgtctccacttaggagaccgggtcatatcaatgccccaggaaaaaatgctggagcatagcacagctctatttgtcaaaggaatttctgctgattaactccttggcataataaaaaggaggatcccaatgagctcaagaaaagaatgggcgctgatcgtctcgctattattgggggccattctggttcccattaactcaacgatgatcgcggtcgcgctctcatctatttcccatacgtataacgagtccatcgcaagcatcacttgggtggttaccgtttatttaatcgtgatggcagtcacacagccgattgcaggaaagctcggtgacatgtacggcaataaaacaatgtacttatggggagtcggcctttttctaatcgcatctctaggctgcgccctttcaccgagtctgctcctgttaattgtctttcgggcattgcaggctgtcggcggggcattgcttacgccaaacagcattgccattatccggcatgttgtttctgaaaaacgcctaccgaaagtgtttggatttttcggactgggcgcgggacttggtgcagcactcgggccttttatcggctctatactgattgacagcttcagctggcattcgattttttgggtcaacatcccgttcctcgccattgctttatttacggcattaacgatgtttcctcaatataaagaaaataaatctgacgcgccgctggatatcatcggctctctcttgcttgcaggcagcatcgtttccattatcctgctgacgaaaaatgaggctccatggggatatactgtatacagtgtattgatacttctttttgttccgctttttttcagaagagaaaaacgtacccagcaccccatcattgactttgcactgtttaaaagctcaacctttacaaatgcgaatctatcagtcttgttaagcaatttgatgatgtatgccgtcttattgattatgccgttatttatgacgaaccaatttgggcttaatacatctaacagcgggatggcgctttctgtattttcgatcttcatgtcagccagcaactgggtgggcgcgcagctccatcacaaatggggagccaaaaaaatcatttttctttcatttgccatgatggctggtgcgaatctattatttttgctgttaagcagctcgcattctgtcttgttcctcatgctctctcttatccttggcgggctcgcttccggagtcggtctgaccagcatgcaggtttcatcccttgccacagtagaccccggtatgtcaggagtggcatctgggattttctcgaccttccgttatttcggaagcatcatttcatcagccttaattggcctgatttcgggatatcacaccctatttatgattctctttgctgtatccatcatcggcgtttttgtttcattgggcatcaaatctgatgaaacggcacggatagaaaaaaactcagcgtaacacaaaacagcccggcatcgcatcatcctgcggtgccgggctgccttttatgatcccgaagcgactgcttcgtcttcacggtcatcctttacgaagaggatgcccaattcatgatgttctccttcataagaagctcgctggtcaaaacgaatttctccattcaaaccgataatttcaagctttacatatgcacggttatgctgaagcgcttcatagaaatcagaaacgttcttaaccggtatgccattgactttcgttatgatttccccgattttcaattccagatcctcagccggcgtattggggataatcccaagcaccattaagccctgatcccttttcgagaaataaaacggagccgcgttatcattcactctttgctttatggacagaaaaatacgccctaacaaagcggtacagaccgctgcacccgcaagcggcgtccacagtaagctcgctgcaccgagaactgcgacggcaagaccgagaatacaaacgcgtttcgctgtgatccttatactcgtttcaggcagcgatccctgtaccctttgtccaaatccgacaaagtaaggaatccatagaaaatggaatgagccgccgggaaccgtaaacacgggccaccagctaaggtgcgattctaaaccattaccgggcacgagaaggaacagcggcaaaagccaaacccggtttgccagctgctgtccgatcggcaaaccgcggctgcttacgacaagtgccggtgatgttctcacatgcgcagaacgataagcaaccgctccttcagtgataatcagcaaacctagaaacacagccacagccggccaaacaactgcaaatccttgcggaaatctctccagaaagggctccgcctgatatatttgcagtccaaaacctatcagcatactcacactgacgatatatgcagcagacatccagtttgcgcgaagagtgaacgctgccgctgcagtgataacggcaataatcgcaagtaaaccgagaggaatcgatattccgagtccacctaaaataactgacaaaagaagacctggaatcagtccctttgtatatgtaaatttcagatcatcataaatatctgctattcttgtatgaaaggtttttcgttcccgtttgattcttacatagccgaaagccaaggttatgatgataaaaaaccagaaaagcgggtgtaagaagaacaagcccgcgctttttaacagttcaattccccattgaacagacactatctctcaccgcctcaagccaaacatgttactcatattctatcaaatattaaatggcttggatatcctcaggagagtttatctctcttgcgtcatccacagcgtgacattcgatagtgaaaaatcctttaaatagtggtttacatccacatccaataacccgctgattagatgcatcgacctttttatatctgtcagattaattcctaatcgcttatggtttttcattaagtagttaaaataatgtttggcgcattcctcattaatgtcatttactgattcgacattggtgtaattgaccaaatatctgctgaacagcataagaagacttagtgcttttgtagctgaaaatgttacgtcttgtgttctgtcttttaattgttccactaattcataatattttttttcacgcacaatacttgccctcttcaattgtgaacccccattttctttatacagataagcacgggccagtataagcagcagtactggagtgctaacaagcattctcgctaacgttactctttaaatacctgtcgttcagctgccattaacctgattactgttctttttagaaccttcttatattgtatgaagtaaacaaagactaggcaacttgcaaaagtttcattttaaatgcatattaactcgttagaaagtctctctcatatattgatatcgggtaataacagtcctttataaatgtttatttgtgaaaatttttttaatttcttgtcaaaaactcattttttatgtgacttatgatccataatctctttaagcacaaagaaacaggagatgaaataccatctcctttaattgacaaataatgatttcaatgctgtttgaagctgcaaatcatttttttcatctgattttttcttttctatctgctgatttaatgtctctgcagtgcgagtgtcgatcacaccggttttattcagcttgttttgatcctgaaaagccataaccgcttttttcatgtctttgctgaaatagccatcctcacgtcccggatcaaagctgagaccttttaacaatacctgcgcatgcttgacgtcttcattgttcatgtccactttaagcggctctttcagctgtaagggcccggcggaaaaataatcgggctgcttaatcgcaatggtcggttcaattcctttcttatgaatccagtttccatttggcgtcagccacttgtaaagcgttaatttgatgttgctgccgtcccccattggcacagcctgttgaaccgttccctttccaaaagacgtatcgcctacaacatcataatggccagcttcctttaatgcgccggcaagaatttctgatgcagaggcacttcctttatccgtaatcacattgacagggtacgcttttttatgggtcaatgttgaaaaataacgttttttatctccattgcgttcagcaatctgaatatacggctgatcctttgtaacgaaatgcttaagaatttcttccacactttgaagatatccacccgggttgccgcgtacatcaatgacaagtccttctatttcttttttctcaagctccctcagcgcttttgcaaaatcctctgcggtgtgctcagaaaaagtagagatggcaatatatccgacagaatgcccctgtacttttttctctgatgcaaaaaccgtttcgagcggaatctcagctctcttgatccggaatgacaactgcttcttcgttccaggccgctgaatcttcattgaaacgctggaccctttttttcctcttatttttaacacagcgtggtttaaatccttgccggccatcgattctccattgatgctgataatttcatcattaggcttcaacccggctttttccgctggcgatttcttgaatggagaaacaataataattttgccgtcttccattccaacctcagccccgatgccttcaaatgaggaatcaagagaatcagaaaattgcttagctgtctgcttgtccatgtaaacagaataaggatcatttagcgtagacagcattccctggatggctccctcgagcagcttttctctatctactttttctacgtactcattcgaaattaactcatacgctttttcgattttgtccatagctttatcccgttcagagtcagcttgtgccgtcgcgggaactgctgcagtctggggcttatccatctcaagcaggttgattcccgcatatacaccggcgcctccgaacagcatgctccctgctgctatcacagccattattttttgattcatcctttactcctcctgtatgccagactgtctttaccaaaacctagagatagtatatgtaaaggatggagatttcatgtaatcatagaagaaaaagaaggcaaatgaaaagccgtcccgaaaacggaacggctttttcactttatactcgcagaaacttgcggatggaagtcagacttccccatactccaattactgcgccgattgcaatcagcactagcgaaacttggaatacaaatggattataaggaagaagagagacaaatgatccttgaacctttggaacgacccatccgatgacgtattggtaagtgctcagcaccagtgcaatcggaatcacagaaccgaatacgcctagcagcaatccttcaaggaaaaacggccagcggataaaccagtttgtcgcgccgacaagcttcatgatttcaatttcttttcttcttgcgaaaattgtaattttaatggtgttggaaattaagaacatcgccgtaaataccaggccgataattaacgcgattccgatgttgcgggaaacgccgaccactttaaacaaacggctgacctcttcttttccataagtgactttataaacatgatccattttttcgatctttttcgccacgttcggcgtatcatgcggatctgtcgttttgacgacaaacgcatcattaagcgggttttcctgatccttcattgtcagggattttccgctgtcaccaaaactgtcaaccagctggtcaagctctttttctttagatgaaaaagtgacactctgaatgcccttcagttccttaatatcgttctgaagcttgtcctgtgccttctgatctgcagtcagatcaatcagcactttgatttcgacttgtttttctgcattcgtggccatgttattcaaattcagcataatcactaaaaacacgccgactaaaatcagcgtaacggttacagcactaatggatgcaaatgtcatccatgtgtttctcccgagagatttaaaactctcacgcaagtggcgcccgagaattttaatcatatgaaccatactcccctcttgactcatcacgcacaatgataccatcttcgattgcaatgacacgtttcttcatggtgtttacgatttctttattatgtgtcgccatcacgactgttgtcccgcggttgttaatttcctccagcgtcttcatgacttcccaggacgtatccggatcaaggtttcctgtcggttcatcagcaatgacaacatcagggttgttcacaattgatctggcaatagatacacgctgctgctccccgcctgaaagctggtcaggaaattgtcgcgctttatgcttcagctgcacgagatcaagcacttcaagcacccgtttcttaatgacagacggctgttctccaatcacttcaagggcaaatgccacattttcaaaaacagtaagtttcggaagaagcttgaaatcctgaaagacaacacctattttgcggcgcacgaaaggaatctctttttctttaattgtcgcgagatctttatgattgattaaaatttgtccttttgtcggtttttcttctctgtaaatcattttaataaaagtagatttacctgctccgctcggaccaacaacatacacaaactcgccgggatgaatggtaacagaaatcccattgagtgcttttacgccgttcggataggctttatatacttccttcatctctatcatgaaatcacctaatcttttatatcattttatctatcacacggtcatactcttcgaatgcattcgacaatttatgacccattcatttgtaaaaagatgaaaaatctgaaagttccctttttcaatacacttcattatacgtcaaatttagacataatactattacagtttcttttcattcatattgtcaaggcataaaaacatccttgccagcactcggcaaggatgtttttatcttactttttttctgacagccatttggcaataacagcggcttcgttatcatctacaagcccctttggcatattgccgcggccgtttttaataatgctttcaattttgtgttcatcgtatttgcctccgacctcttggagattaggccctgacacaccttctaaatccttgccgtggcagcctacgcagctttgctgatataattcttccccttcagatgcagtggcttccgtcttgctgccagtgtctgtcttctcttcttttgcatcgtttgatccgcaggcagccaacagaacagaaagcgcaaatccaatcattagtatcgataactttgatttcatgttgagaagcacaactcctttacgatctcttccatattataacctcgtttaagcgcgtttgaaaccctcgcccagcacctcgctcgcgtctgctacaattacaaaagctgactcatcaatctgtttgacgatttgtttcaatttggtgaattcagtttgcccaaccacgcacattaaaatcggacggtcatcgtcagtatatccgccgactgcagaaatttttgtcacgcctctgtcaatcttctgtaagacagcctccttgacagcctgctcctgctttgtaatgatgagcgccatttttgaacgattaaagccgacttgcacaacatcaatggttttgctggacacatagacgccaagcatggcatataagccttgctcaatattaaatacaatcatagccgtaacaacgatcattccgtcaatgatggcgagacacttccccaatgacagaccggagtacttatgaatgatctgtgcagccaaggctgtacctcccgtcgaacctttccctaagtacacaataccaattccgatacctatcccgacaccgccaaaaatcgccgccaggagttcatgatgagtggcgggctgaatatcccttgtcagaaacactactagcggcaaaaacacagaacctgcaagcgtctttagtccaaatttcccgccgagcaaaatgacgccagcaataaataaagggatattaataatccactgtacatacgctgcttcaaaaccatatgattgtaaaatcgtactgatcccgctgaccccgccggcggcaatcttattcggaagcaaaaatacattaaaggacacggccgtaatcgctgctcctatcaatatgtatacataatcccgcaaaatccacaatgttttattccgtacgtccatcatatatcctccgtttcttccaatgctctccgatagcattttaatccttccctgattagatgtaaataacacccaaatacagtggtaatatgctaaagcagcagtgaaatcaaggatataagaaataaaaaaacacacccgtatgcatcaggtgtgtttttcagcttatgaaagcttagaacgcaggtaggcatcaataaacgtatcaatgtcaccatccattacagcttgaacgttccccatttctgtattggtccgatggtcttttaccatggaatacggatggaatacataagaacggatttggctgccccagccgatttctttttgttcaccgcgaatttcatccagctctgcctgctgctcttcaattctgcgctgatacagcttggccttcagcattttcatggctctttcacggtttttaatttgtgagcgctccgtttggcatgtcacaactacgttcgtcggcaagtgagtaatccgaacggctgaatccgtcgtattgacgtgctgtccgcccgcgccgcttgcacggtacgtgtcaactttaatatcctccgtacgaatatcaatatcaatttcatcgttaaattcaggcatgacttcacatgaaacgaaagatgtgtggcggcggcctgatgaatcaaatggtgagatccgcacaagacgatgaacacctttttctgctttgagatacccgtaagcgttgtgtcctttgatgagcaatgtcactgacttgattcccgcctcgtcacctggaaggtaatcgagagtctctactttaaagccgcggcgctctccccatcttgtatacattctaagaagcatagagccccagtcctgtgactctgtaccgccagcaccagggtgcagttctaaaatcgcgttatttttatcatacggctcgctgagaagaagctgaagctcaaactcattgaactcttttgttaatgactttagttctttttcaagctcaagctggagatcagtgtccggctcttctttcaaaagatcatgagtcatttgtaattcttcgtgggattcattcaattttttatacgaattgacataatcctttaaaccgtttgcttcatttataaccgtttgagctttttgctgatcattccagaattccggatcagccatttgttcatctagctcagcaatgcgggcctcctttgattcgaggtcaaagagaccccctaaagtccgctaaacgagaagccatattttcgagctctgctctaatttctgataattccatttcattcacctcattaaaagatccgcaggcgcctgcaggcgccgcggtcagtaaacttgccggggcgaactattcagtacggccgcagcaatttttatattttttcccgcttccgcagtggcatggggcatttcgtccgatatcaaccactttgcgaaccggtgctttctttgcttttttgttatcgtcgccttcttgcggctgatgagctgttgtttgaccttgtacaacctcttcacgctccagattgttttcaatctcagctttcatcacaaattttgcgacttcgtcctcaattgattcaatcatatgctcaaacatcgcaaaaccttccatttgatactcacgaagcgggttcgtctgcgcgtaagcacgaaggtgaatcccttggcggagctgatccatcgcatcaatatgatccatccatttagaatcaacggcacgaagaacgataactttttcgaattcgcgcatttgctctttgccgaattgctcttccttctcattatattttgtgatgatgcgatccataatgagctcaagcatttcatccggttctttgccgaagatatcgctcttctcaagtgcaccttcatcaagataagttgtgttgataagatcaactagaccgtcaagcttccactcctcaggaagctcttctcttggcgtataggctgcaattgcgcgttcgagagaagacttgatcatattttcaacgatttcacgcaggttttcagagtcaatgacttcaaagcgctgcttataaatgacctcacgctgctggcggagaacatcatcatattgcagaagctgtttacgcgaatcgaagttattgccttcgacgcgtttttgagacgattcaaccgcgcgagataccattttgctttggattggagtagagtcgtccatgccgaagcggtcaagcatcgccattgtccgctcagctccgaatctgcgcatcaattcatcttccatagaaagataaaattgagtaatccccgggtctccctgacgtccggaacgacctcgaagctgattgtcaatccggcgtgattcatgtcgttctgttccgactacagcgagcccgccaagctcttttacaccttcgccaagcttaatgtccgttccgcgccccgccatgttagtcgcaatcgtaactgcgcctttttggccggcctcttcaatgatctgcgcttcacgttcatggtttttggcatttaacacttgatgcggaattcctttgtttttaagcagcttagaaatcaattcagatgtttcaacggcaaccgtaccgactagaacaggctgtcccgtcatgtaacgctgtgcgacatcctccgcaactgccttaaactttccttccatcgtgcggtaaattaaatccgggcggtcatcacggacaacaggcctgttggtagggatcgtgacaacctgcatgttgtagatgttgcggaattcttcttcctctgtcttagctgtacccgtcataccggcaagtttttcgtacattcggaagtagttttggaacgtaatcgtcgccaaggtcatgctttcgttttgaatctcaagcccttcctttgcttcaatcgcttggtgaagcccctcactgtagcggcggcctttcatcagacgtcccgtgaaggaatcaacaataacaacctgtccgtcttccactacatagtcaacgtccttttgcatcgcaacgtgagcttttaaggcctggttgatatggtggttgagcgcgacatgcttcacatcaaagaggttatcgatgccgaatgctttttccgccttcgtcattccttcttcagtaagctgtacagcttttgttttgatatcgtacgtgtaatccttctccgcttttaacgtgcggacaaaagcatttgcctgtacgtacagcttagtggattttgcagcttgtccagaaatgataagcggtgttcttgcttcatcaattaaaatagagtcaacttcatctattaccgcaaaatgaagcgggcgctgaaccatctgctctttataaagaaccatattgtcacgcaaatagtcgaagccaagctcgttgtttgtggagtaagtaatatcagcggcataagcttcccgtttttcgtcttttgacattgagtttaaattcaaaccgacagtcaaaccgagaaactcgaaaattttccccatttgctcagcgtcacggcttgccaagtattcgttgacagtcacgacgtgtacgcctttaccggttaacgcatttaaataaacaggcagggtagacgttaatgttttcccttcccctgttttcatttccgctatatttccgtcatgaagcgccacgccccccatgagctggactttaaacggaaacatgcctgttacgcggcgtgaagcttctcgaacaacagcgaaagcttcaacaagaagatcatccgttgtcgcccctttttcaagacgctctttaaattcaattgttttatgtttcaatgcgtcgtcagagagattttcatagtctccgcgaatcgcatcaatatcgttagcaattttttcgtatctattcagcgtacgttttgttggatcaaacattttatttaaaattccaagcatttataacgctcctctatcatcacacgcctattttagaggcatgtataaataatttactagtccatgtatacctctcattatcatatcataccttttgttatttccaaagaatttgcaaataagaaaaacaaaaaccttccgcggacatcacggaaggcttctcttcattattcagtcggttcaattaagccatatttcccgtcatttctgcggtacacgacatttgtaaggtttgtttccgcatttgtgaaaacaaagaaattatggccgagcatattcatttgcaagatcgcttcttcactatccatcggctttaaattaaagcgtttctgacggacgatgtccaagctctcctcctcttctatgtcatcctgaaccgcaatatctgtatcagagccaagaccgtttgccaataaatattttggagagccctgctcacggaatttacggtttactttcgttttatgcttacggatttgacgttccagtttgtttgttgcgagatcaattgcgttgtacatatcctcgttatgcacctcggaccgaagcgccagatctgtcatcggaatcgtaacctcaaccttagactccttgtcattgtaaaacttcaagttgacgttcacatcagcatccacgctatggtcaaaatagcgctccagcttgccgatcttcctctcgacatgatcctttaacgcgggtgtcacttcaatattttctcctctgatgttatagttcatcaaagaacgcctcccttttattaaggatatgtatctatttctcttttaccctttacaattcctgctgaaacataaatcttttgtgaaaattcagtgaactttgtcgaattttgtttgtatttgctctgttattggcggttcggaggtatatgtatatgctgattgaacgaaacaaatacctcacacacgcctaattgattaaaaagggttccatacattgatgaatagacagcatccattttctataatgaatcagaaaatgttcctttaaatactcacagaactcatgagagggaaaagagaaagagaccaattgatcaaactccgcaaaaatttggtcaaatgctttcacacaaatttcagcacaccgcgaatccataatgaagagaagtgttgaatgtgttgaatccaaataaaaaaaggcttggatcagatcttggtagatccgatccccttctgtttttgataaattctcttcagcctctatcaaataacacaacccctcttcgatggtaaaaagaagatgataataagctgataaaagcgtataatcttcaatgctcttcaaggcactcacctatttacgcttgtcataatatgtgccgtcaatcgtaatgttgttataagggtttaaatacgtcgtatgcatcacacgttttcttttcatctgctgaagttctgttgcgattgactgcttcagtctttccatttccttcacaatcagctgatcccatgtcaaaataagtttcatctgctttcgctcttcttctgaaagcggcagagatatctcctgaatcagttcagaccgtgtagccacaaagtcttcaatttgctttaaaagttcatcgctttccggcgtattttgtatgtgtgacagcatactcttcgtctcagtgtatagttgatctatattattcatgcgatcccgcctgatccgtgccggtccttccgctcactttgaatggcttgtttccaagcatcgcgaaaatctgttacataaccttcaacctcagccagcatgcccgtatcatttttgatatttgcctgtaccaatctgcgatacatataatcgtacatcgcacccatagaagcggaaagctctatgttacggttaagtgtaaaatttaattcctgaataatattttgcgctttaatcagattttcatttttacgttccatatcatcattctcaatggcctgagcggcaagtcttataaatttcaaacagccattatacagcataagcgtcagctccccgggtgtagccgtattcactgaattttgctgataggctgtatatggattttggatcgccatgtgtcatcctccaaattacatttattgtacaagaagctgtgataaataggacgcttgttcgttcattttttgaatcgcagaatccattgcactgaattttgaataatagcggttttctatggtattcaatctgtcctgcatatcagttatttcagtacttatcgagtttaaattttttccaatggaatagctactagctcccattgtcgagttcccagctttagcttcaatacttttcacagtacttctaagtgtattagtaatccgcttcataatacctttatcgctatagttactatcatttgttccacttgtaaaaagattagcaactccttgaggatcttctgctatttttgctttcaatttctcttcgttaatctctaagtgccctcgcagttggtaagcacttgaagttgtgatgccaaattcagttaattgataggttttcccatccgcattcacttgagtataaaagtcagtccgcatttggttcgtgccagtgctgatgcttgaatcgtttctcagcaatccgcttttcgccttctcctcccagagctctacctctttatcggacatggcttctttttgttcactcgtgagtggcgtatagtctcggtatttttcttctttcagcttttcattcaggctgtcaaccagttcattgtatttatctacaaactctttgatttggttataaatcccatcaacatcagtagaaacagatgtggtaacagggcctgtggctgcagttgtatttttaatcgaataagtaacaccattcaccgtgaaattgtttgtcagcttctccatttcaaagccgttgattgtgactttggcatttgtgccttctttgtaagcagtaagcttattatcagcatccaaagaaaaaccaagctgaccggacataaagtcagctgtagcagagtctgctgcctgtatgcttcctcctgcacctgttgctttagaagaaaacgcaatcgtttctacgtactctgtaccattccaaattttatctttaaatgctgatactcctagatctgagctgttaagtttagaaatcacattatcaatcgtatcggcactcgtcacactaatgttcactgtttttgctgttgtttcgccaggcgcaacaacgttaaatgccaaattgtaatcgccttgtgtgtatcccgtataattgtttgccttatacgttgctgcagttgccaagctcgccacttcaacagtagacgaagaatttggcgcacttacgcttcctgtagcagttaacacagactcattagagcttgtcacagttttgctctgatacgtgctcggatatgtcaacgtatttttagacatataatcttgcaattcttttatttttgagtttacttcacgatagctgtcacgctgccattcaagagtctgctttttttgtgtcagcttatcaagcggcgctctttctgtctgcatcagctttgatacgatatcatctatatccattcctgacgccagacctgttattcttgtgaccatctcaaaccactcctattctactttttttcatctacaaataacccaagaaattcagtcatagccgcataaaaatcaagccaccgttttggtggaatttcgcggatcacttcatttgtagagtcctctattacctttacatagtattcatttaacttgtcatgaagctcgaacttcagatgaacttgcgaaggttccaaaagcttgttcatttcccccaccatttcagcaagattggtatatgaaacttgatgaacaggaacctcgttatcattatctttctgattatgtatttgagtatcataacgatcccaaacaggttgtaacgtagtgagcctttcaatgttcaattgatcatcccctatgccccaatctatcgtttatatcgactaagtcgagataagattacacatatttttggaaaaaaatcttctgttttagatttcttgtatggaaatacatttataaaaagttagtggagaatccggttattatatcatgagttagtgacaggatgaggaatgattaggagatagaaatttaaattaaaagaccctggcaacgccaaggtcttttttaaaattaacgtaataattgaagtacgttttgcggctgttggtttgcttgagcaagcatagcttgagaagcctgagaaagaatgttgttctttgtgaattcgctcatctctttagccatgtcaacgtcacggatacgagactcagcagctgtcaagttttcaccagaagcgcttaagttgttaattgtgtgctctagacgattttgtaccgcaccaagcttagcacgttgagaagaaacttggttgatcgcttcatcaacaactttcaattgagcatcgaaaccgatatcagcagtatctgctgcattatctgcgaattttgttacgtcaagatcattaactgaatgaagagctgcaattgaaccatcagcttctttaattccaagagcgtcagcacccatatcctcaatatttacagagatttgctgtgtagcatttgctccgatttggaataccaagttcttttgatttgcaggagtagctgtgtcaactttgtaagtgccatcgagcaatttcttaccattgaattctgtacgatttgaaataccatcgatttcatctgttaaagctgaaatttcatcttgaatagattgcaaatcagttgctttgtcctgagttccagtgtttccagcttgaacaactagctcacgaacacgttgaaggatcgcatgagtttcagttaatgcaccctcagctgtttggataagagagattccgtcttgagagtttttagaagccatttcaagacctctgatttgtcctctcattttttcagagatcgcaagacctgctgcgtcatctcccgcacggttgatgcgaagacctgaagaaagtttctccatgttcttttggctcgcactgttgtttgaagacaaacggttcagtgtgttaagcgctgcaatattgtggttaattctcattgttttgttcctccctgaatatgttgttaaggcacgtccttgtgcccttattttgtaactggctgagtcttttgcgcctcctcccggctacatcattaatatcggattgtctctgattttgttaatacaaaaataaaaaaatcctcactttttttgtgaggataatgcggagatcacatcgctggataacgctgctgcacggttattttcttcctgaatggtcaagtaaatttctttcctgtgaatatcaatatgctttggggcgtcaattccaagcttcacttgatccccttcaaccgcaatcacttttacttcaatatcagcacctatttgaatcgcttcgtttattttccgcgataaaactagcatgattctcctccaatcggatgctttgtcgtatatgaggagtcgtgtaaaacgacttgcttagccatcatgttcttgcgattcacaataatgggagccaataaattcgcagtagacttttcaaatggctctgccatagtcaatattgtcatgacttctacgtcttgaatattatcgatatccaaaagttcagcagttgattcatcaagatcaaattcataattcttaaaaaagataaacggacttacgacgataaacgcaagattttctgaagtgacggactgcagtgccacgaatggagagtcttctgaaagcggaagtatgacgaactgtttttcttctaaaaagcctggaatcccgctttcaaaaagaatgatttgttcttcttttatgttcatttggccatggtacttcgtatgaatgatcattgttcacgatccttttctttttacttttcgggtgattctttcgggtattctacatctatatttaaatcagggtattgaagcatgtcaaccttaacatttcctggcgtatattcaacaattggcttatgcggctcagcctgaataacaggctttcgcggcgtaatctgcacatcaagctgtgacggagtatattgtattttcaccctcgaaagagaaggagcataattttcgcctaattgaatttggtgcatttcagagttcctccttgcttgtgaagcgattgggttccccttattttcaatcttcataagctcgtcgccttcttctgcagtgcgtgctattccctccattacatcctcatgcccttgttgggcggcttcttcaattctcttgaaaacatgctttctgtctaattcttcccatgcttgtgtctggtcaatcgtgagttttccaggtgtcaccgatatttccatttccgcactcggctgttcgatctctagatcagcttgaggctgctccatttttaagctggcaggcgtcgttgttaaaccaatttttccttgaacactatgcataatcaatctgggaatctgcatcactctacctcctgaactataaaaaaagcgaactcctaagagccgcttactttaaaaagtcaatcaatgtaggctgaacaatttgcgcattaacggccagagtagccctgtgcacactttgctgcgcaataaattcagttattacttcttccagttctacatcttcattgtctgataacactttggtagctgtttcttcttgcgctgacagtcttgtattaaccagttcaagacgattatatctcgctccaagatcagatcgttcagcgctcatgccgtcagaaaaatgatcaatatcatttaaaacactgtccatgccatctagcgaaccagaatttagtgctttctcaaaagaatcaagcatttcaaatacattctgcccgctttcagaagtgcctccaaaagctgactttggatctgaattcactttcaatgacatattatttgatatattgactacgacatcagctgtatcagaaattgtataagttccgtctccgttatctgtaaccggaggcttatctgaatttgtgccattaaagatatatctgccgttcacttgtgtattcgcaatatttaaaagctgttcctttaactgctttacctctacgccaatcgcttgccgctccggctcgccgtttgtatcattttgagcttcaaccgctaattctctgacctttgacaagatgtcaattccttctgtaatgtttgtttctgtgttttcgagccaggtaaaggcttgagaagcattgcttttgtactgctgcacttgagacagttgcgtattatactttaagcttttcattgctactacaggatcgtcggaagcttttgagattttttttcctgaagaaatctgcgactggagtttatccagcttcgagtagcttgaaccgatatatctcagtgagttttgctgtatcatgccttgtgttactctcatgtgactctacctaccttcctccaacacccatgccgttgatcactttatcaagcaattcgtcttgtaaagtcaccattcttgcagctgcattgtatgcgtgttggaattgaatcatattcgtcatttcttcgtctaaagaaactgcgctcatttgctgacggtttatgtcagcatcattcagctgtgtttctgtattagacgccagtcgattagcctcttgagcttcgatccctagctcgccaatcagacccgcataataatctaaaacactagtttctttaccgttaatggttattttaccggttaaaacatttgctaattttgtagcatttgcgttatcgttggctgcgccagtcagtgagaaagcaatgtttgcgccttttgaatctattatgctgtcagccactttgatcttgcccgccgcgcccttggcaggttcagtttcaccgccagtaaaatcaaaaaagtctccgccttgttcaccgctcttggtcacaccatttctgtgcacttcattgaaagctttcgcgaattcaagcgccatattgtcaagatcagaaagcatttccgggtatacgcccttttcttggccatctgctgttatatacccataagactctataaaccctaaaagggatcccttgctgctaaaggactccgcctgtacagctgtatccccgattgaaatacttgatactaacccagtttcattatcatagttggctgcaagttctgaaacctcgtaatttttaccgtccaaaacagttcctagcgactgtttatttttatcaaggatttcaattgatacagttccttcagcagatgcaagtgcattcccgcctgatttgttgtagctgactttgatatcaaccattgaggataatttatcgatcagcaaatctcgctggtcatataagccattcggaagaagcccgaccggctctacttgtgcaatttgcttatttaaactgtttaactgagaaagcagagaattgacatccaacacagttgtatttagctctgcttttaaattcgattggacatttgtaagtgattcagaaatataattaaacgtttcagctacagcttgtccttttcgagcaacaacagaacgtgcactttcttcatttgtattattcgataattcctgcagggaattccaaaacgaattgagcacactgttcaagccgctgtcatccgtttcatttaaaacgccttccatttgggacagcgcttttgccttcgtgtcatagtatccggcactgttgttttgaagacggtattggtagtcaagaaagatatctcttattctctcaactgattttccttgaacgcccgtacccatttgtcccgctgttttttctgcatttttagatacagcagggaaatagtcagttgcctccaatgagacccgctgtcttgtataaccatcagtattggcatttgccacgttatttgcagtagtgcttaacgctgcctgctgagcgcttaacgcccgccttgcagtttcaagccccataaaggtagatgtcattttctgaattcctttctgctaagcttttgaatcaaacagtttcattttgctacttttcggcagctcagctttaattgatttgctgtaattgaagttattttccttaggaaccagcatatcgtacgaaatagagatgaattgcagcgcgtctcttgtcagctgcctattcatctcatttacttttttcagacgtccgagaacttgagaaagagattcgtatagttgttccagctcttccttttcactgcctgaggttttggcgatacatgcggaaatagtattattttcgctatatccgagaaaggccgaagttgttttgatccggtcatcttctgtctgcgtgattgcttgaatatatttttgctcttttgtcaaaatgttagaaagctcttttgttttgccggctttgagcgcttccgtcttttcttcagacagcgtgagcaggtgctcatgcagaacgcaaagtcgcttcaattgttcaataattgccttcgctgacatgggctttctccttttttattgctttttataaaaattaatcatatttttcgcaatatgatttgcgtctactttgtatgacccgttttcaatttgcgctttaagctgcgcaattttttcctgtcgtgaaccagtgactgcgtcggatgcatgttgcatttctttagcctgtgatgaaatttcaattttatcttgaggctgtgcaacagttttttgcaccgcttgcttatcataatttttttgatatggattaacggattgtgttccaaattgattgattttcataggattcctctcgctttccgttgcagtctttaaacaatcttaacccttttatcgactgcgttttcagttagtttagggaatcagctgtttttggtattataggcatagtatgtgtcttttttactattttctttctcgattttcagagcatcctcgtggttcaaatgatccatttgatccttaatatcagactggcaagccttgcagaacttgccttctctaatcgatgtcccgcacctttcacaagggtatgccaaattaggaagatgagtgatctgaattcgcttctgcctgatgaatttcaatatcagctcttcttccacacctgtttcctcagttatccggctcaaagttgattgccggttttcctgttttcttaaaaatttatagacagtctcaaatgatttttcttcttccttaatacacgcctgacatacggtttgcagctttgtttttaaaaataaagcattgcatttcggacaattagccagttctcccatctttttttctccttattagataatatgcctgtgtcaatttctagtgattatatcggcataaaaacagaatcatttagcttctgatcaaggtaaaagatgacactgaagcggcttttcctttttctaataagcagcgggctgcgaagtgcaaggtggcgcctgttgtataaagatcgtctattaaaatgatattcataccttctgctgaattattttttgtatcaaaaatgcactctgacagcaggcgttctgttttctttttctttgactgtttctcattattcaggcgaatgaggggatggtgggaaggccggtctaaacattctgccaagagatgtgcctggttaaatccgcgctcttcttcccgttccttgctcagcggaataggtacaagaacaaaatgcttatcggggtaaaccttagaaaaggttgaagaaaaatcacttttaaatgcatttatgatttctgcatctcctctaaatttaaaacgggagagcgtttctttcatcatatcattatatgtgtaaactgaacggttttgacgcaatagcaaactgtctctgatccttgttctccacacctcgcaatccctgcatacggcatgaacagattgaggtctgccgcacagggggcagatatgtcctgtgattttctttaatttgcttctgcaagaataacaaaccttttcatcaggctttagtaaaaaaagggctctccatgtaacatcttgagaaaattgcgaatcacataataaacagatcagtttatgaatgcctcctcctgcttcgtttgacataaatcgcttggactctctgaaactactgcagcagattcagccaaaatgacaagcattgctgtgtttttttgtttatctaccagctcagctttcgtatatgcgatctttttaaaatcagtaacgtaggatggactcactttgtttaaagaaagtgccaatacatcgttttggcatacttggcaagtacaggccatatgaagctggtccatatatcggtcgagcagttctttcattacgatttcttttgaattgacaagcatttttacagctcctcatcatcggttatatgagtatactgtaccacgttttcaaataatggctagtctgtacattcaacttttgctgccaattcattcatttcttttatatgctttcttgcatcgagcatactctttgttttgccgaagtgaaagtaaatgacatcgccgtccgcatattctttatgccggccggttcttcctgcaatttgaacaagtgcgctttccgtaaagatagacgattccgctcctagtacacccgtttgcaccttggggactgtgacgcctctttccagtattgttgttgtgattaatagatcgagctgaccatctctgaattgctgcactttctcctttctatgcttgtcttccgcgtgcacagatgcggttcggcaatgaacacctttaaagcacgcagcagccttttccagaatagaaacggaaggaacgaataaaaaaacaggcctcccttcttttacatgaaactctatccatcttttcaccgctggcggaattttatttcggtttaatttcttcttccagtttccacaccatacaaagcgcggttcgggtaaaggtttccggtggtgtcttgcggggatgcgaactgaatgtaactgtccgttcagtgcttttctttttaattctttaggaggtgttgcacttaaataaacgagggtgctgtttttctttcttgctttttgaacagcgaattgaagggtttgatcagcagaatatggaaaagcgtcaacttcatcaatgatcataacatcgattgcatctttatatcgcaaaagctgatgcgtagtggaaatcataagcggagatagccgccctttgtcatcgcttcctccgtaaagcgctgaaatgtcagcaccctgaaaggcagccttgagtcttggagcaagctctaatacaacatcggtgcgaggtgttgcaatacatacacgcagtccttgatttaacgctgattctataccaggaaacagcatttctgttttgccagcgccgcaaaccgcccagatgaggagctcttctttttttgatattgcttcaattaaaacattggcggctttttgctgtccgcttgaaagcttgccatcccatgtcagcttaatagacttccagtttgattcattttcctctttccatgaatataaaggaacctcctcactcactctgcccatcatgacacaggaacggcaatacagcttattctttccagatgagtgataaaaagaaaaataccgctgatcagtttgtccgcacctattacatctatatctccgtttatttatggatatagaattttcagcagtgatatatccattcttgatatgccattcaatcatctcatcggaaaatgagagctcagtcctgagcaaatgacggcttcgaagcgtctgctgcaattcttttgaaaaggaactgtttttttcaactggcacattcacatagcacgcctcctttcgaaacagtatgcctgaatgaatattttctgtccaactattaaaataagaatataaaaaaatctccgctctaaaaacggagatttggccttatttaaaacaccagcaaattcctaacgcaccttcacccaaatgagtgccgattaccgcgccaaaatagctgttataaaattcaacatgaggatattttgcagaaagctcttcaatgattttcgctgcttcttcctctcgattagcgtggataacagcagctcgcataggcaaccctttactcgcatcttcgtctaaaagctcataaattcgcgaaattgcttttttacgtgtgcgaatcttctcaaaaggcacaattaccttattgtcaaaatgaaggataggctttacctttagaagactaccaatgaaggcttgggcgctgcttaatcgcccgccgcgctgaagatgggctaagtcatctaccataaaataagctcgaactgtttttttcatttcttccagttcttttataatatcttccggcgatgatgctccgtttttgattaattcagcagctttaagggcataaaagccttgagccaagcagctgatctctgagtcaaatggatacacatcaatattgtcgaccatcgaatcagccgctgctgcactgctgaatgttccgctgatcccgctggaaagatggatactgataaccgcatcataagacttgccaagctcttcatacaacgcaaccagctcgccgattggcggctgagaagtcgtcgggagctcattatgttttttcacttcttcataaaagcttttccagtccaactcaatttcttcacggtaagtctcctccctaaaaacaacctggagagggatcatatgtatctgatgttgttcacgcatttctttcggaatatatgccgtgctgtctgttacgactgcaatattcatagcttcgatacctgccttattgctttataactctattgtaagggaaacggcagcctaaaaaaagacctgcctagtaaaaggcaagtctcctattatactatctcatttctacccagccatttttaatggcgaccacaacggcttgcgtccggtcgtttacattcattttttgtaaaatattgctgacatggtttttaacggttttctcactgataaacaatgattcaccaataccgcggttgctttttccgtctgcaagcatctgcagcacttcacattcccgcctagttaaaatatgtaatggtctgcggatttcagggtaaacctcatgttgagggtgtgcagaaactccgcttgttgcaaggcggcggaattcgttaacgaggttgtgagtaaccttcggatggaggtaagatccgccctcagccactactttaaccgcttcaattaatgtatcagcatccatctctttcagcagataacctcttgcacctgttttcagggcatgtgttacataattttcgtcatcgtgaattgatagaataattactttagattcaggatacagctctacaagctgttttgtagcttccacaccatttacgtttggcatattgatatccatgatcacaacatcaggatgatagtgctcaacaatacgagccgcttcgtccccgtcatcaccttcggctaccacttcaaaggtaggttcaaaatccaatatccgtttaacaccttcacgaaataactgatggtcgtcgataataacaatgtttactttagtcacaagccacgcctccttgtattattgttctatatactctagcattcggtcaatatgccttttggctctattttacaaatcatagtcaaagagataacggaaccttaatcataataaatgtcccaagacctattttcgaatctattgtcatcgttccttccaataaatctactctttctttcatgcccagcaagccgaatgatttgtttttcttctctttcgcttccttcaggtcgaaccctttaccgttatcttttatcattaaaatcacaaaatcctttgtgatctcaactttgactgtaatttcttcagattcagaatgctttagcgcattagacacagcttcctgtgcgagcctgaagagcgcaacctcaaactgaggcgctagcctctgatcctctgtttctccaatgcactgaaaatgtattttgaccttcccgttatattcctcggttgtatatagatattttcttaaagttggaatcaggcctaggtcatcaagggccatcggtcttaaatcatatataatccttctcacttcgtaaagggcattccgaacattttggcggagatttttaatttcttggaatccgtcctctgcgccccggtcacggaaaatccgctcgattaattccgatctcatcataacattcgccagcatttgagcgggtccgtcatggatttctcttgagactctttttcgctcttcttcctgcgcctcaataattcttaagccgaaatcctgttttgcctgagcatcagcaagaagcagtccaacttcgcgcaaatcctgattcaagtagttgagcacaactgtaatttggcttactaatgattctgaccgctcaatgatttcctgaagccctagcaatctgcgctccaaatcgtcccgccgttcgcgcaattgcttctcacgctgctggatcatcgtcaattctacctgcagcttatgggctttttcataagcattgcggatttcctcttcactgaatctatgaaaattacggctgacctcggataaacggtttctcgcatggcgagtttgcacttcaagtttatcgccaagctcaatcacttcatacacctgctgtttaatttgtttcagttcttcgaccagctgttcatactgctggcgtgactgctccccgatttgaaaaacctcgtccttgctcccgtcaacggttttcagcatcttcatcaaaatagaatccagcactttggaatccatctttgttttattcataatttccctccgtcacggcgttgtcatatatttttattataaatgtaattgatctgcaaattatgtcgaattataatgaaagaatgcgtatattctagaaaaaaacatttttatatactatctactctttatgataccaaaatacgcacaaaaattctaaagactgtacgaatttgtataggcagtcttttatgcttagcaggagggtcagctagcatgctgcacagctattttactgtgaaagaagcgggagaacacgagattgttatagaaaaatcgcgttttatctgtcatttaagccgtgtttctaccgaacaagaggcacaggaatttatacagaaaataaagaaacagcactggaatgcgactcataattgctcggcttatgttattggcgagaatgatcatatccaaaaagccaatgatgacggggaaccaagcggtacagcgggagtgccgatgctcgaggttttaaaaaaacgcaggctgaaggatacttgcgccgtcgttacacgctacttcggaggcattaagcttggtgctggcggattaattcgcgcttatgggaaatcagtgtctgaaggattaaatcatataggtgttgtagaacggaagcttatgcgaatcatgcatacttctgcagattacacatggcttggcaagattgaaaatgaattaagggagtcacaatttctgttaaaggaaatccattattcagaaaatgttgaattcgaaacatacgtggaagaaaaagaaaccaacgctttttctgaatggatgacagaactgacaaatggaaagagtgatattaaagagggagagttgacgtatcttgaaaaagccgtcaatcacataaaggagactgaataatggctgaacgcgttagagtgcgtgtgcgaaaaaagaaaaagagcaaacgtaggaaaattttaaaaagaataatgttattgttcgcccttgcactattggtagttgtagggcttggcgggtataaactttataaaaccattaacgctgcggatgaatcgtacgatgccctatcccgcgggaataaatcaaatcttcgcaacgaagttgtagacatgaagaaaaaaccattttctattttatttatgggaatagaggattacgcgactaaaggacaaaaagggagatcagactctcttattgttgttaccctggatcccaaaaataaaaccatgaaaatgctgagcattccgcgtgacacacgtgtgcaattagctggtgacacaacgggaagcaagacgaagatcaatgccgcttacagcaaaggcggtaaagatgaaacagttgaaactgttgaaaacttcttgcaaatcccgatcgataaatatgtcacagttgattttgacggatttaaagatgtgattaatgaagtcggcggtattgatgttgacgtgcctttcgatttcgatgaaaaaagtgatgtagacgaaagcaaacggatttacttcaaaaaaggcgagatgcatttgaacggcgaagaagccttagcatatgcccggatgagaaaacaggataaacgcggagactttggccgtaatgacagacaaaaacaaatcttaaacgcgctgattgaccgcatgtcaagtgcaagcaacattgctaaaattgataaaatcgcagaaaaagccagcgaaaacgttgaaaccaatattcgcattactgaaggtttagcgcttcagcagatttacagcggctttaccagcaaaaaaatcgacacattgagcattacaggttctgatttgtatttagggcctaacaacacatattactttgaacctgatgctacaaatctcgagaaagtcagaaaaacgcttcaagagcatttagattatactcctgatacaagcactggcacttccggtaccgaagacgggactgacagctcaagcagttctggcagcactggcagcactggcacaacaactgacgggacgacgaacggaagcagctattcgaatgacagcagcacaagctcaaacaacagtacaacgaattcaacaactgattcatcctattaaaaaatgcccggtccttttagaggatcgggcatttttgcgcagaaaaaaactccggcacataagccggagtttttaattccttttcaccagccgtttataaaactttgtaaacggcttaaatttttcattcacgagtcctgtcacttctgctatgatttgcataaaaataatcaaaatgaagataataaacaaagaaagccaaattgtggcacttttaagtacaatcgcactgatactgaaaataaatccaattaaataaataactaagaccgacatccgatgtgaaaggccaaaggccatcagtctatggtgaatatgcgacttatcaggcgctgaaatcggctgtttgtttaatattcttctgatgatagcaaatgttgtatcaaaaatcggtacgcctaatataataatcgggataacgatactgaacaatgtgacacttttatacaggcctaataatgaaagaatcgagatactataccctaaaaacagtgatcccgtatctcccataaagatttttgccggatggaagttgtaaaacaaaaaccccagcgtgctggcaataacgactaatgagagtgacagaatgagcacttttccgccggatagcgccatgacagcaatcgttgacaggccgataacagaaagaccggcagcaaggccatccaatccatcaatcaggttaattgcgttcgtgatgccgacaatccataataccgtcagcggataagccatccatcctaactcaaatcgttctgttaaaaaaggtactgagaaaaagtccatttttaagccagtgcttacaatcataatggctacacctaattgaatcaaaaacttaacttttgcacttaattgatatttatcgtcaagaatacctaacacaataatgatgaatgctccgactgtaattgccgtcatccttgtttctgtgtaaataccggatgcaagcacgcctgcaaccaccccgataaatatggccagcccgcccatgcggggcatgattttgtcatgtacttttcgattgctgggctggtcaactgcacctattttaatcgcaatcctttttacgattggggttatgattaaaactgtcagcagcgagacaataaacgcaacaacaatgcgaatcatgcgttcgtcaagcataaagaagtctcctttggaattaaatgaagtctttatttatatagagaaccgttccttccattataccttctccttagttattataacaagcttcatcaaaaagaaacacgtataatcaaaaaacgcgcatcccaatttataggactacgcatgtttttgaatccctgtatatttcataatttgtctaaataagcaattccaatcttgtgtccgggcgatgtttcggcgcatttctttataggtctcgtctccgttttgaccgagaactttttcacaagcggctataaaatcaatcggatgatcgccctctacatattcgtatacatacggcttttgcatttttgaggttgacggaagattagtgcctacaacaggttttcctgccgctaaaaattcaaatagtttcagcggaaacacagcttgattatacggtgattgtttatatggcataatgccaatgtcgataagctccatataatgaggcacttcttttggatctgccggaccggtccatatgacattgggaagcctcagcagctcttgaaacgaaacatcaccattggtggcatccgggccaacccataaaaatgtccaatcaggcttttgcagtgccgcttctttaatcattttaaaatcgagcttcggtttaatcccgccaataaaacctaacactattccttctctcccctgcagtatactgcgatcgggagcttgtttatttgcagaaaacagctcatactccacaccgttttccacagtatgaaccttttctcgtcctgcagtcagttttttgtctacttccttgtgaagataatctgatgaacaggttattgaatctgctcgttgtataattctcagctctgccgatttaatgacttttcgccggaattcagacagcagatttgatcggccgctgatcggcgcagcccataggtcactgcagtcataaatgacctgatcccaagaatacagcgaagacagcagcgggaatccgggaaacgtgtaccataaacagcagcgttcaccgtttgcagaagcaggtgtaagctcatcgagtaatggggagagcttatgtctgtaaaagacatctgtatatcgtccgaaacgaaacatttttttctgcagcaggtctttgacagcgaattgcctgatgccagaatggacttcctgaaactctttcccttgggcacgcggagccggacatacccaaataacttccttcgtttcctcctgagcagctaaaaattctgccagccggtgccttctgtatctcaattggtcttttccccattcagcagtggcaacgatgacatgaatgattgcttcttttgtttccaccttcatcaccttttctctctgtttgcagctataatctttttttcaccgcgttttttgcatattgaacaaaacaccatgttgctttcataaaatgaagccgttcgatctccctgtagacaaaccacgtttttttcgcagccttccatttgttgctggaaattgaattattgacaagccgatattcagccaggcattcattcattccataggcagtaaatcctttttttaaaagagacagccatgtggctaagtcctgtctcgttctgatattcggcatttggatctgtcccgtttgctccctgtcaatcatcaccgtcaagcagccgataattgtatttttcagggcgtcatcgtacgtcaggctttccggcgcatgaataaatttatcgagcggggtcccgtcctgcgccattaagctgtagcccgtgaaagagaacgcacaggagcgctccatcataaactcaagctgcttttccagtttgtcttttttccatttgtcatcactgtccaaaaatgctacgtagcgcccttgagcgcgttccaacgctttgttgcgagcaaccgcagctccggagttctcttccagatacaccacatgaattctttcgtctattttttcatactgctgtaaaatgtcgcgggtcccatccgttgagcaatcatccacgataatcatttcccaatgaggatggctctgatctaataccgaatgaaccgtgtcttcaatatagtcacgcgcattataggaaggtgtaatgacagatacgagaggtttccaattggtcatgatcacatctccatcgtatgattttaaaaggattctctgaaaaattcaggaatgacaacgaacataaaggcaatcgtaaggccaatcataacgccgagaactgctttctttttcggagacataccgccgcctgctgtctcacttacggtttcggaatcagtaacacttgccgctttcaggttaagctgtgtgtttttgagttcatataaaaatctctctttatccactttggaatcctcgctcaccgactcgccttcaagcgcgtctatgctgctgcggatgacggcttctctttctgcatacagcttttgatcgtttttgaggaaggtggaggatatggcgtttaagacagattccgttctatccttatcctcgtcactatagcttaaagtcagtaacgatttggattccgtattgattgtaagcttctctttgatctctgctacatcttcatccttttcatcaggaagcgcctccttcaaaaaggagtcgctctttaatagaagcggaatctcttctgtgctgttataaaccggatgatcatagctccccacagccaaagtatcttcagctgtatagctcttttgatcagcgatctgtgacggcaggatataccccgccgcacctaatataattggcaccgctatgatccaaatgatatttttttttatgcgacgggctattcttatcaatatatcgttcatataagtctccctgctttttgtagtctgtttatctgtacatcggctcaggcatttgtctggatcgccttaacacattcacggcggcgatgacgagcgccataaacacccaatggaaaaataaatttgaaacagagcttgggctgatacttgataccaggaaactgaccatagcggtaataagtccttctgtgatcagttttgactgattttctaattttctttcataaaacttgtaaagcacccatatgaggtaggcataaacggacaaatatcccagcatgatgaacaaaccaaaattagcaagaatttcaacaagccagttatgcacctctgccacattgtcagtatcatatacagcataatgctcaagataataggatacatttcctgccccgactccgaatccgtatgaatcaaggaaaaaatgccaagcgtttttcagcagatttgcccgagccacatttgatggaagcctgtcatgaaatgaatgcagcgtctgcggggccagaaacagctcccaaaactttgaatagattttgctggcgaaaagaactgcgaaaagagcaattcccgccgccgacagccatatagccattctctttaaaacaggcggcaatacaatgaagatgtagacagcaatacctgcaaaaatgcccagaaggctggctcttgaaccagtggcaaaaattaaatacaacgcacagagcgagagcacaaggccaattgccttgatgtatccattcttaatgtttttcatcatcgtgatgtaaaaaaagaagctgatggataaaaaggtcgcaaagtcattttgattaaaaaagaccgatgtcggataatgctgcttgtactccggtccgctgtacaatgtggaactcgcaagatgatggtgggtgatatgattgtaaaaaccaatgatcatcagaaataccgtcatcaccagccaaatggcataaacaatcatcagccgctccattttttgcacgtacatgacaataagataaatgaagaagatccccattgccaataaggctaaatacttgaggccaactgttaccgacttggcccacagcagagaaacaaggccatatataaaccaaaaggcgaaaaagagtaaaatcccttttacttgcagcccatgccatctttcaatatgggttcgattccgaaccatgccgaaaatatgaaggcaacccgctgcaatgagcagaagccggtaaaggaacaaactgaaaaatccaagatgaatggcaaaaaatgcattatttaaaaaagtgcaggcgatcaaaatatagattacagccataaagagccgttcttttgttgtaaatgcggttgcaagcgtcagtaaaaacaggccaattgccaacaccgcaagcacagcagccatctgcatgaaacctatatctttatggatggctcccagcaataggacgactccaaatatagcagcggccagtaacgctagcgtatggaccgctgatcgtttgatactcacatgtttaacccctttcctgatgtttcaggagccggcggccgagcctagcagccggcagcttcaaccaagtaacactttttctttttataaattgacgcttcccaagtctttagccaattcttcaagcggcaagcccggaaaatacttgtcagagggttccgttccccgaacagcgggacggccgatagagtgataaatgtatccggctgcctgcatctcttcaagtgaaaataaatttctgccgtcaatgatgactggctgttttaagagggttttcacttttacaagctccatttctttcacttccggccaatccgttaaaatcaggcatgcatcagtgtcttccatcgcagcatacacatctgtgtaatactcgacctgttcgccaaggatcgctgaagcttcaggaatagcaatcggatcgtatgcttttacatgggcgcccagctgctgcagcattgggataatatcaagcgctggagcggatctcacatcgttcgtattcggtttgaaggctaatcccaggactgaaatggttctccctttgacgcttcccataacagtcaaaagtttatctacaatatgaacacgctgcttttcgttcgtttcaatgacagcttcgatgagcttgaatggatagcctgccgattttgcgatttgaagcagcgcggttgtatcctttggaaaacatgaaccgccgaatccaataccagctttaaggaactttctgccgatacggctgtcaagaccaacaccatcagcaacttttgaaacgtctgcgccgactcgctcacaaatgtttgcgatatcgttgataaaggaaatctttgtcgccagaaatgcattcgcggcgtatttaatcatttctgcactttctaggtttgttttaatgacaggagcatggaatggctgatgaagttcctcaatgatggcagcggctttatgacttgttgaaccaatcacggcacgctccatattcatcgtgtcatgaatcgctgacccttcccgaaggaattcagggttagatacaacatcaaatgagtatctcccctttgaggctttttgaacgatagattgcaccagtttccctgttccaaccgggactgtgcttttatttacgatcactttgtagccgttaagatgctcaccgattgttttcgccgccgctttgacgtacgttaaatcagcttcacctgttttggacataggcgttccgactgcaatataaataatatctgaggcccgaatggcagacgggatatcgttcgtaaaggtcaggcgctgatccagcacatttttttcaactaagtctgcaagccctggttcatagattgggattaccccatttttcaggcttctgatttttgattcatcgatatcacagcaaacaactttattgccgatctccgcaaagcaagtgcctgatacgagtcctacataacctgttccaatgacagctatttttttcacagcgctcaaccctctcctgtaaaatgatcttccaatttataatggtcgcagtgtcttacgattaaacggacgttttcgtgaccgtctgatactgatgatgcaaggccttggcgttttttcctgcgtcaaattgagcctgcacggtttcatacaagtcatctgctacttccggcttccatatttgctcatgttcgtaccgagtgatcgcttccgccaaggcttgagcggatttcggtttaatcagcagatgttggtgctttccgaataaagacgacactccgccaacatccgtacaaataacaggaacccttagcgccagcgcctcaatcacaacagtcggcatcccctcactgtaagaaggaagtacgaatagatctgccgcaagtaaatagtctcttacctgatgattcgggacttggcctgtgacgatatgccccttctgcgtcagcgtcgattttgcgggaccatccccgacaaagactgccttaggagagtcctgcagcgattcgatcgcttcagacagttcaaaaatgcctttctctctgaccagccggccgacatagacagccagacgctgatcgagcgggagtccgagtctttttctgatttcctctttcgtctcctcattcccctgaaaacggctgagctgtatgccgattggcaaaaccgagctgtcaaagcccgaaagctttttggcttcttcctgaagcttgtggctgactgctaaaacaactgacgcagaacctacggcacgcttgaaggctttaaacgcacctttgctgtaatgcggatagacattcacatcactgccatgcaaggtcaggacataaggaatttgcgctgactctgacacgactgccgcagccccgcccgatggcatggcaaaatgcgcatggatcagatccggatataggtcgcgctgtttcattgtttttaaaacggctgatgcgattctccgatgaggctgcgcccacttcagctggccgggaactgcccgatagaaaggccggtaaaccggtatcccctttctaatctcatactccggtctgacatccttttttcgatatgtctttttcagcatgcggacaggtgctgaatgaaaaggccgtgggcatatcacagtgatatcaagcccgagtttttgcagctcttgcacctgtgtctcatgaaacacaccctctccgggtttcatactgctcggatatacgcttgtgatccacaaaatcttcatgacaaacgtccttttcttagtagtttgcttttcgtttgagggtacgcttttaccaaaagaaagagatagcacagcgccccagccgcaactgaaatggccagccgcatttctgcctgcatactgaagtgttcggtactgaggcttacaccaaacgcgatgatgcccatcgccgcagtaatcagaaatggcttcataatcgactggaaataagctgaaaggttaagcttgatgacatatgccaaaagccagcgcccaatcaggaaattaacaacgctgataatggcatacacccatgcgactgtcagcaggcttcccgtctgtacagctgcaaacagtgataatccgtacagcagcagcacgccggaatcccaataaaacgctaagtcagctcttcctttagccagcaacacagatccatttggattcatgagcactcttagtattccgacaatcgcaagaacatttaggatcggaacagcagcaagccatttttctccgaaaaccgctgtgataaaggcgtctgacacagacacgagcccgattaacagcggaaacgaaacaagcgccagcatttttgtcatattcagaaagccttctctgatcacgctgttttcatatttgttttttgcgaaaatagggaatgccacccgtgtgacaatcggattgatcttcaaaaccggaatggtgacaatctgataagcgaggttataaatccccaatgcttcagcaccaataaaccggccgatcaaaatcatgtcgatatttgctcccagcctgttcacaagacgggatgaaagctgaaaggctccaaaagaaaagaaatccttcatgcctctcaaatcaaaaacaaaagcaggatgccacttttttcggtatacagcccaatataaaatccctttactggactgcagcaggacttgagaaatcacgtacgccaaaatcgcatccatcataaaaaccgctatcgctaaatatccgaatgacaatacatttgaaaaaatctctattttgcttaacgtattaaaatgcagctgcttttgcagcatatactgatattgctgtccaattggcgcgatcaaaaacataatcgccagaatccgaaccagaaacaccagctcttctctttgataaaatcccgcaatgacaggactgctcacatataaaagaacaaacagcaaaacgcccgtcataatgttaagccaatacaatgttgacagctggcgctccgtcgcgtcgtctctctgaattaatgctgcgccaaaacccatatcgagcacaatctgggcgaaaactgtaaccgttgtgatcatgccgacaagcccaaattctgttaaggtcatcatatttccaagcagggcaaactgaacaatttgtatgattgtaatacacatggttgaaatacttgtccactttgcaccgctcatgatttgttttgtaatacttggcatcatattccctacttctttttaagctcagattgatggtgaataatggaatcccgttttatcttgcaccatcacccgtccaaactactttacaagtttttaacataatttttaattctaaagtgaaagtcagattgcgaatgtaatataaatcaaatatcagcttttccttcggcgtcatatcgtaaccgccgttcacctgagcccagccgctcaatcccggtttaacagccagacgctgtgtaaagcctggaatctcattctggaatttttccgtaaatacgggccgttccggacgagggccaatcatactcatatcgcctttcagcacattaaacagctgaggaagctcgtcaattctcgttcttctgataaaagctccgatccttgtcacccgcggatcttgcttctgtgcccaaaccgccccagacttctcggcatctattttcatggaacgaagcttataaagcttaaatggcttcccgcctttccctacgcgttcctgcgtataaatggcaggccccggcgtctccaaacaaatcaaaattgaaaataccgcaatcattggcagcgcaatcgccaatccaatgagcgcaaaccaaatatccattacgcgctttattgccaaataacgagccgtcttttcagataatgtaaaagaatgtatttgttgaactgagaattcacgactcacattcatgcttttctctgcactcactgacacacacctcacgatttgtttgggatgttatgatgacctatgccagtcagtttagcagacggatgttaattggatgtaaatggtatgttaagaagtgtgaattacgtgttttttctgataaatgttgttaatactcttttactattttatatacaagtcctatttgttttaatcatttcatataaaaaagagacaaatctgtgattagatttgtctctttcgattatctgtaataagatactgtgccgtcatgaatagcttgtgcagctttatctttataaaccgcttgcttcaatttacttgcatctgatgcattagtgataaaggcagtttcaactaaaacactcggcattttagaatatttaataacatagaaagcagctgtttttactccccggtctctcgttccaagattagccgctaactttggttgaatttgttcagccagtctcttgctatttgcagcttgatatgttgtatcgtagtacgtctcacttccatttggtgatgagctatcattagcatttgcatgtatactgagaaataaatctgcttgtgcagaagctgctttatttactctctcctgtaaagaataaaaagtatcattagatcttgacagtactggaagagcacctgaagcatttagctttgtattgactcttttcgctatatcaaggttgacttctttctcaaggagtccattgccgattgctcctgaatcttgatcaccgtgacccggatcaataaagattgtttcacctacaactggattctttagctgattagcaacctttgtgcttacggcaggagtgtttccgataatcataaagtttgacatgtttttacttccaataattttacgggctcctgtagataaattttcaccatttgtaagaataagagattgcttcttcttagctgccagtgtagctcctgcaatagagtcagggtagctgaatccattgcttacatatacggtgcttgttgataaattaagtttttgtacgatatttgcagcaagctcatatctgtttgaaccgctaattcttgtaggagaaggtaacttgttgtataccgtattgctgatacttccagtgcctcctacaacaacggtactcgaaattcccttatcttttatcacagacgtagtcgcactatttatagatgttttatttgtaaaaagaattggatacccgtttttcgctgcataagggatgacggccggagcgtctgcatataagaagccgttcaaaataacagcttttgaagtcgcacccatcgcttttgccacccgtgcagccgtatcataacggttgcttcctgcaattcgtttaatacttatccccaagcttttaatctggttagcagtgttagaagaaacagcaggtgttccgcctacaataattacatttttagtctgcatctctttcaatcttgttttcgtttcatatgaaagcttatcagaattagtgtaaagcaatggcgcattcttctggtaagcaagaggtgctgctgaaatagcatctgcataggaactcccaccaacaattacagctgtacttgctgttgaatacatttgctttgatatttgtacagcagtgccgtatctattgcttcccccaactcttttcactgagttatcggccaaagctgttggcacaaaaagtatgagccccagaaaacacattgttaggacttttatataagaacgcaattgatttcctccttaaatggcgttatatcctaaaataatcaataacttgtcagagttgtacctggatagtaaaatttcaaaattgaactatatgaatctccagcttctgctcttgcttttgctccatattgactcattccgatcccgtgaccatatcctttaccgctgattgtgtactttgaagtatctttttttacagtcacataagtacttttaaatacagtcgctccaatcattgttcttaactcacttgttggtacactaatggttgtaattttgctcaagttataggagccagtactgcttttaacaaaatacttcactttcatcgatgctgtttttgcacgctgcccttgtgtcgttccactaaagcttaaatcgtcaatacttgcaattttgacagaatcagcgcttgtttctttatttttcaagatccagttcttaactccggaaagtcttgcagaatcagtttcagtcgctgaagaccaccaagaagaaggcttcgttaagtccaaagatttcgtatctagctgttgttttgacaaagtaagcgtccagcctatttgaggatcctttgtatctttttttgcaatcaagtaaggtacacttgacgaccacacttcattactagcttctgtgtaaccaccattactggaagaataagctgcagttataagagatccattatatttcagaactttccccttcgtttgctctaccgctttattggtattcgaattccaactgtagccaccataaacttgaaaagcggttgtatcaggtacagtagttcctgtttttgttattgagtaggttcttgcagcgacagtctgtgctttaagagcctcaagtgaccagctagcaggcatttcattcggaattactccttttaagtaatcctcaaatggaatattctcatttaccggtcggatatatttagtagactcaatagagaaattaaccgtgccaagatactgctttccatcaagactaattctgtttgaagtagaatagttttctggtttaattcttagggagtttccgtaagttttgatgttttcaaggtttaattttccgctgttgatttttagattataggtgccaccgtcagctaaataaaattcatcagcaagtgaattctcaacttcagcagaaattgaactggtacttccaataaagtcgtatgcatatgtggctttatctttcgttatacttttagccgcagccggaacgctatcttgtttaacaaataaaatttggctgtttttcttcgaggcaagcgaagcgcctatcaatacgtctgcatattttgtcccgttcgtcattacgactttatcagccttcaactttagttgcttaattatatttgccgtaagttcatatctggttgatccaggaatcctttgcacagttgaagtttttttaatttggttttctacactatcactgacgctaaatgaactgcctataatgatgacttgttttggcaaatcataatccggaagcttgtctttctctgtaagcaaaatagggtatccgtgtgctgctgcatatggagcaatggctaaagcgtcttgaaatactcttccggttacaacgatcgctttatcatagctgcccatttgctttgcaatattttctgataagacatatctattttttccgcttatccttttcacagcgccatatgatttcagcttgttttctacgtcttttgaaatgcttcgcgctcccccaatgattaaaatattatcagggttaaacttagcaatttgtctttcagtagtttttgttaacgtgtcaggctgagtaaataaaactggtgcgttcagttttttcgccaatggaataacaggcaatgcatcaataaaaatatctcggttcaccaatatcactgtattaggatttttccactggctgttggatgcaagagtcgcagtttcgtatcgtgaagcgcctgcaaaacgatccgtaacagcaacattatctccagttactttataaaatcctgttggcgatagactgatgctagatttatttccaatataatttaacaatttaactgagatgtttgagtctgctgcaaaagaaactgatggaatcaataataagattgcagcaagtgaacacactatcaattgtttgcaagatttcaaaatttcaggttcctccctatatcttagttggcacgttcaatatcttttaacagaagctgaccctcatcatttttttcatatgtaatcgtgaccttatctccactgttaaacttatcaagatcacttgtcgattcttcagtgatatcaagactaaccggctcattatctactgttacttctattgtatgagtatcagctaaccctacataagtaccttcttttgtttcaatgttactgtctggcgatacatcttcaccttgactcttttgactattaaccccgcaacccgaaagaagcaatataaagaacagtaaagcaataaattttttcatttttttcacctcattatattttatcgtcaacctattttatattttaaagaaaaattaagaaacaatgaaacttttttttataaaaaacgactattttaggatttcattcttgtattaaatagagttgtatttattggaaatttaactcataatgaaagtaatttaacagacgaggtgcaaaggatgagaaacgaacgcagaaaaaagaaaaaaactttattactgacaattttaacgataatcggacttcttgtactcggaactggcggctatgcatactacttatggcataaagcagcttcaaccgtggcaagtattcatgaaagcattgataaatctaaaaagagggataaagaggtcagtatcaataaaaaagatcctttttccgtcttaatcatgggtgtggatgaacgcgacggcgataagggccgtgccgatacgctcatttatatgaccgttaacccaaaaacgaatacaaccgacatggtcagcattccgcgtgacacgtatacaaaaattatcggaaaaggcacaatggataaaatcaaccattcatacgctttcggcggcacacagatgacggtagacactgttgagaacttcctcgatgttccggttgattattttgtgaaagtgaacatggaaagctttagagacgttgttgatacacttggcggcattacagttaacagcacattcgcgttcagttatgacggttattcgttcggcaaaggagaaatcacgctgaacggaaaagaagcgctcgcttatacccggatgagaaaagaagatccgagaggcgacttcggacgccaggaccgccagcgccaagtcatccaaggtattattaataaaggcgctaatatttcttccatcacgaaattcggagatatgtttaaagttgttgaaaataatgtgaaaacgaacttgaccttcgataacatgtgggatatccagtccgattacaaaggtgcgcggaaacatattaaacagcacgaactaaaaggtacaggcacgaaaatcaatggaatttactactaccaagctgatgaaagcgccctttccgatattacaaaagagctgaaggaaagcctcgaaaagtaaaacaaaaagaagcttcgcacaatgtgcaaagcttcttttttatttgcctgtaaatgaatccggttgttcttttcgatacccgtaatgaaacagcaattcttccacaatccggcgggaagcctctccatctccatacggattagaagcctgggacattttcttgtactcatcaggatcagttaacagctgttttgcaagctgataaatgttttcctcatccgtacctgcaagtttcagcgttcccgcttccactccttcaggccgttccgtcgtatcacgcagaacaagaaccggtttcccgagagatggggcttcctcctgcacgccgcccgaatcggtcaatataaaatgcgatttcgctgcaaagttatggaaatcgatcacctctaaaggttcaatcagatgcactctgtcagaatcaccaaaatgcttatgagccgcttcccggacaacaggattcaggtgcacagggtaaacgacttgtacatcttcaaattcccctacaattctgcggatggccttaaacatgttttccattggctcacccaaattttcccggcggtgagcggtcaagagaatcattttatcctcacccacctgatcgagaacaggatgtgagtaaccatccctaaccgttgtgttgagtgcgtcaatcgctgtattgcccgttacaaaaatagagtcggcctttttgttttcttttaataaattgtctttcgcctggcctgtcggagcaaaatgcaaatcagcaatcgcccctgtcatctgtcgattgagctcttccggaaacggggaatacttattccctgtacggagccccgcctccacatgaccgacagcaatttgatggtaaaaagcggctaggcttccggcaaacgtcgtcgtcgtatcaccatggacaagcacaatatcgggtttgatatctttaaacaactcatccaatcttacaagtgcgttagacgtaatctctgccagtgtctgccgctccttcataatgttcaaatcgaagtcaggcttgatgtgaaacgcatctaacacctgatcgagcatctgtctgtgctgtgcagttaccgttacataggaatctatttcaggatattttttcaattcaagcacaagcggtgccatcttgatcgcttcaggcctggtcccgaaaacggtcatcacttttagttttttcatatttgtcacctggttttctgctatagtaaataaattcatactacatattctacatgaaaatgcatcattttaaatcatttcattcttgattcaaataaaatgatataagttttaatattaaggataaagcttgtttaaaaatggtttatccgatatcataaaaatgtgtaaaaacatattgaaaagggtaaatagagaatagtttaaccataaattttttcgatcataaggaaggtgccttttaaatgaaaaaagtacgtaaagccataattccagcagcaggcttaggaacacgttttcttccggctacgaaagcaatgccgaaagaaatgcttcctatcgttgataaacctaccattcaatacataattgaagaagctgttgaagccggtattgaagatattattatcgtaacaggaaaaagcaagcgtgcgattgaggatcattttgattactctcctgagcttgaaagaaacctagaagaaaaaggaaaaactgagctgcttgaaaaagtgaaaaaggcttctaacctggctgacattcactatatccgccaaaaagaacctaaaggtctcggacatgctgtctggtgcgcacgcaactttatcggcgatgagccgtttgcggtactgcttggtgacgatattgttcaggctgaaactccagggttgcgccaattaatggatgaatatgaaaaaacactttcttctattatcggtgttcagcaggtgcccgaagaagaaacacaccgctacggcattattgacccgctgacaagtgaaggccgccgttatcaggtgaaaaacttcgttgaaaaaccgcctaaaggcacagcaccttctaatcttgccatcttaggccgttacgtattcacgcctgagatcttcatgtatttagaagagcagcaggttggcgccggcggagaaattcagctcacagacgccattcaaaagctgaatgaaattcaaagagtgtttgcttacgattttgaaggcaagcgttatgatgttggtgaaaagctcggctttatcacaacaactcttgaatttgcgatgcaggataaagagcttcgcgatcagctcgttccatttatggaaggtttactaaacaaagaagaaatctaaacaaaaaggctattggacattcatccaatagcctttttttatttcaacatcaaagtcaatgtatgctcttcattatcaactgcgaagacctgatcaacggcctgccgcaaaaattaataatcccagacaaacacactgattgtagagttaaacaaactaaatgaaaacataaatacaaacatgcagattaaatagtaaatatcttgtattcaatgcaagctaagtaaacaccacttgctaaaagaacaatgactaaacaaccagcattacaaaataattaaataaatttgaagcaattacaacagaaggcagtgaactgtcggaaagttcattttggctaccatattaatccctttaactacgctgttggatttatcaagaattgtcgggctaatagaaaaccacggaatcaaaccagccagcattcaaacgataaaaggcacttctccgatacctgttatgaccagcttactgttgcgcatcccaaatacaaaccagtacgccatcattagaataaggggatttaaaacctgccataatacaccaaaataattgattttttggatctttcggttaaagaaatttaaaagtaccagtgaatattgtaacaaatgttgagtttttttcacttttaaaaagtaaagagaagtctcgcagaacttctcccaacatttgaagtgtcaatataaaacaaaccaacctcatttagcaactttattattatctaattccaaaatagcattataaatacgattcctattatttttatcagtatatgcaaaaaagttatctactctttttctatacttatcttccatacgactattgtttttcatataatagataactttatccactaagctattatgattttctaatacatcaccaaaccccatttttttataatcataataatcaagtttaaaatggtatgacttttcgtattgataataaataacaggttttttctcatatgcaaaatcaaacgcaacagatgaaaaatcagtaatcattatattagaagaattaaatagcatttgatagctgctgttatagtcggcaaactccacataatcatgcttttcaaagtctacaatctgttgctgaatatctgggtgaggaaaaaaagttattttataattatttttcttagcaaattcgattagccgttcatcattaatcaaagcattatacctagaaaaatattcactatctttaaatttcgggttgtacggtcttactccttttgcctgatctttcggtaatacaatatcttttctccaagtcggcattattagaagttgcttttctccctcactcttcttaagattatcgtatctcggaaatccacccaacaaaatattctcttttttatagttgtaattccctttcacaatagaccgatattcaggtttggcagaagtgactaataatttgatattcttgttgtatttgtttaaccattcagaatgatctgccattgttattccgtgctgtaaaaagataaactcaaagttaaataaatctctaaaataaatctccatattaaaaaatggatttacaacccatatatctgcatgtgtcgatattactttggaagaggataaggttaaaattttatgtctaaaagatctgtatggtatgacctttccatattttttgattctgtcgtaatccttgctatctttttttattataaagtatttttttaccccatcattcttgttgattgcatatttaaagaggtgctcggcattatcatcagctttgtcttgtctgtctatgaataaccatactggttttctattaaaaatagtgaaaacatggtgtaccattcttgccatcagtgccttcttaatcgctgattttcgtttttttgatttttcccctgatttatgtagggattttaagaaacgaaactcttttataaatctatttttaaaattgttttttttgaacattaattttttataattataataaaaaatataatcttttttagccacataagtattatataaatcgtttgacaaacctgaatacttgaaaaaacgaagttttgtcaacttcctttttttacccttagttataaaaaactcaatatgatgattatctgctagatgacctttgggaatatctattgaaaaaccgggatatttttttattacttctcctaaacttatataatcattatgctgtctttttatattctttgcttttatttttgtttcgccaattttagcataaaacttaaaacctttagaattaaacagcgagctccaaaagccttctatgtgaatggaatcctcattttcttctaaaatttcaatagttaaagtttgatccgataatttcgaaacaattttaccttctctgtataaataataatcctgttcagtttctctttcatatacatacctactataattttcaccgtgctttatttttaaagcatgatataaatagaaatggctgacactttttgtttcaatgatgacatcgtcgtcaatatacgacaatacttctcgaatcaatgttaaaaattcactgtattcattttcgtctaaaggtgtttcactgatatccttaatcaataatttccacttcaaatcatgcataaccatatattgaagaaataaaggtattttctgttcatgattttttataatatcgattaaattctttgagaaagtgataagtgaatggttaaaccaattcttatttgctttagcagtctgcatggcagatgatccatcttctctaactctataatggtattttgcctctttaaccagaccatactttttcttttgcgatatgattaaattaactagtttggcatcttcacctattttacaattttcatcaaacctgatatttttcaaggcatctttttttataaatgtagaacaacaatgagttaatatatgatgcggttctttttctacatccaaaattcttgtagaagaaaacttattatttagattatgttctccagttcttccttctgcaaaaaaaatagggattgctacaatatcaatttcattcttatgttcgtcaaagaagtttaaaacattttcgaatgttccttctgaaactaaatcatccggatccaaaaattgaatatatctaccttcagcatactttaaaccataatttcgagcactgctcactccgccattctgtttctttgcatagacaatgttattgggatatttctgagcatattctttacaaatgatttcacttttatcggggctatcatcattcaccagtattaactgaatattctcaaaaccaatagtttggttaatgatactttctatagcttcagtgagatacaactcaacattataaatcggcattataacactgaaatcatagttaaaacttttttcgttcataaaagattactcctaacataatgtttatatgaataagaattcgggtaaataaaattaagaaacaagagagtactaatttttgcaaaacaattttaatttagtaaaatgtatgaaaagcattccttacctttttttaaaaacccttgtaagcaaacttttaaaaatgttcacatggttaagttctaaagaatcatttggtgtttttagtacaaagtcaaatgcaaaggcccaaatcggtatttcgacaacaaaaccagcatatctaaaatctcttaatttatatccccatacttcaattgtttttttcagttcttttcgtttgcatttttttaatcttttaaaatattttatatatattctgtcattttctttcatctcataatactggttaataaagtgccctgttaattcaagtctaagcccttttatttttgccgaagtaacagtacatgaactatgcagtactctttctttttttatattttcaagagcttctgtattttcttttaataagtgaaacataaattctttatagtacatcggcatatcttgttcttttataaattgcgggtcaataaattttaaaactttaataaaatcatcaacaaaaactctttgttcttgttgatctaaaacagacttataaacatctctatagttcggatataaaaacagttttatatgatatacaattaaaaattgcaaataaggcaaaactatatcatatttgttgaatgaatccatcaacaaagtcatgtaacattcattcaacaaatatgtgtacctttttttgttaaaccatgaacgatcaactaaagaatcctgttctttccgttttctataaaaatactttccttctgcaactgctccgtatcttttttctttcagtaataactggttaaaaaagatagcgtcttcccaaaactttatagattcatcaaaaaggacggtactagttagtgtatgtcttctgtaaaaagtgccgccaatataaaaatgaatagctttataatcgttgagaatatttataactcttgttcctttttcaaatctattatttaatttatgtcccccttctttttcacctgtgtaataaacaggtaataccgcaatatttacatgttcggaatcacaaaaaaaatcataaacactttgcagcgcattttgagagaatgcatcgtcagaatcaagaaaaccaataaatttagatctttcgcttacatttgataatccacaatttcttgcagcagaaggtccagagttttcaattttcatgattttaatattattaggatatagatttttaaaggattcacaaatttgaggactgctgtcaacactaccatcatctattaatatcagttctatattttccttaaatccaattgactggttaaggacactctctattgaatatcttaaataattttcagaattatatattggtataattatagaaaacatgtttgtacctctttatttagaagttaaaggatcgtttcaattactcttttagaagccttgcctcttctaaattacaaaatttattataaaaatcctcatagttatgatctatataaggattatgtaacaactcttttaccgtatctataagttcttcacttgtttgaagcaagtttcctggcgttttttgctgaaaattaaagtaaaaacctctgatacagtctctataagccgggagatcatacacaaaaaatacaaggtttttttaaaaattcatattatcaaaaaagacagaagaataatccataatcaataaatcactaattaaatataaatctcgaatatctttatttaaagaaacatcgttcacaaaatatttatatttccctaattaaattgttctgaaactggataataccattcttacaagaataaccatagagtctccaaggttccctcttcatttcctctaatcaaattaaagttaaatttatactggccagctttcttaaaattcattatcccgcaaagttggtgcatataaaattatttttctttaattccttatttgataatgtagaattggtaggggattgtagctaaactgtttccagaatagctttcaaataaaattaatttattgtttcttggcagaaggacaaaaattttaaacaaaactgaataaactctaactagtaaacttctgcaattggttataataaaaatttcatcagtgaactccttaaagagtgaagattaatatttacgcaaacaagaaaaaaagaagcaactgaatttacttcaagcctcttttagttagtgcttctataaactagccatatcttttctgatttgggtagttgaaatgcctgctattcttgtaaggtaaatggcctcatagtattcctttgtagacaatcgtacgattaagtaatcccaggttcttttgctctttccagtagcttcatatgtccatagtgaaataaatcaaacattccgtacgtatcactttcttcattagataacatcaccttccaaccttttccaacttagaaaaaacaaaaatccttaactgattgtttatcatttcgacatattttttacgttccattaataataaacaataatagcatatgttcctataaaagttaaggctctttaaaaatgtaaatcatcagcactttttgacaatatcgttgcattgatgtgtattttttacagatctgatatcttatctatactcattacaacaagttttctattccggaagagtcaattctttttgtcgcgttttcaagtgtaatgattttctttctgctgcgtcatttattttgtacgccctcctcatattacttcatcgtcaaaacgtgaaggaattgtaatacgtagttcctaaaaattttcgtggtaaaatttagtgaagtctttatcaggctaagggactttatctaaactacgaattacatatggagatatatagatgaaaaggagggttgatatgatataaacgaaaatcaattagataaaggaaaaactgaacacttctgaaaaaagtgataagtttctttcactatatcctccaaaaagaacctaaaggtcttggacatgctgtctggttcgcgcctaactttatcggcgatgagccgtttgcgtttctgcttggagacgatattgttcaggctgacacaccagggttgcgccaattaacggatgaatatgaaagaacactttcttctattatcggtgttcagcaagtgcctgaagatgaaacacactgttatggcatcatcgccccgctgacaagtgaaggccgccgttatcaggtgaaaaacttcattgaaaaaccgcctaaagacacagcaccttctaatcttgccatcttaggccgttacgtattcacgcctgagattttcatgtatttagaggagcagcaggttggcgccggcggagaaattcagcttacagacgccattcaaaaactgaatgaaattcaaagagtgtttgcttacgattttgaaggcaagcgttatgatgttggtgaaaagctcggcttcatcacaacaactcttgaatttgcgatgcaggataaagagcttcgcgatcagctcgttccatttatggaaggtttactaaacaaagaagaaatctaaacaaaaaggctattggacattcatccaatagcctttttttatttcaacatcaaagtcagtgtatgctcttcattatcaactgcaaaaacctgatcatctgtattcacaagaaaacgcttcttgctgctgtcatacaatacatcgctatcacttaaggatagtgacgccgggttgataggagaaatgttatgaaaaataagctctgttgctttatcattctccagtacataactgattttttcataatcaaaattcagcgtttttctgccgtcagccttatttccttcagtataaccattcaatttcgattgaatgctggtgctgctgtctcctaggaatttcagaaagtattcataggaagatgctgcgttttgcgagacataagacgtaaatgcagtggcatgcaattcagcgtgtttcatgttagttgcaacagcgctctgtttcacataataagagtgcccgtcaaactttattttcgctgcttgtttgccttttgcagctaccgttacttttgtaccgaatggcagtgtaacgtcagccttctgtttcaaaccctgatccttataagcagccgctttttcatttgctataaacccttgcttattgattgcagttaagcgttcctctgacttgccctttgcatcgccatgatggttcttcacttcattttgcggaatagcgccaaacgaagcaattgtacgaagcggggcattaaagaacatcgttcccgccatgaagacagtcagaatagacaaaatagcaatttgaatggcattggccagtgatttcggctttttcttctttttgcggaaacgggcaaacgcttcaggatcttctttcttcctctcttctgtctgctcttttttatatgtctctttttcttttttcgatagcttattaaaccagtcaataaacgctttgtactctttcacaaccgtttttgtttcatcaaacatacgaagctcgccatagtgcatccaagcaacacggtcacacatcttttcaatctgaccgattgagtggctgacaaagaaaatcgtttttccttgctttttaaactcatttattctgtctacacacttctgataaaacgtttggtcccccacagaaagagcttcgtcaataattaaaatgtcaggatcaatatgcacggagatcgcgaaaccgagacgcgacttcatcccgctggaatagtttttaaccggctgattaataaaatcgccaatctcggcaaattcaacgatgctgtcatacatatcatcaatttctttattggttaaccccatcatcaaacacttgagccggacattgtcccggcccgttaattggttattcaaaccggcagcaatcgcaatcagcgacggctggccgttcatttcaatttcaccgctggtcggcggaataattttagccagcaggttagacatggtcgattttcctgacccgtttattcctacaaagccgattgtctccccttcatacacgtcaaaggagacattccgcacagcaaaaaaaccattatccttagccggaaaaaacaatcctttaatcttgtccgattgttttttatacaaatgatactgctttgaaacatttcgaaacgaaacttttagtttcatcgtaaaatctccttacgtattaaagaaagtcaacaaacttgtctctgaatttcatatgcaggatagaacctactaacaataaaaggaatgtgaacaaccaaaagtacagcgtgtacttcatgtcatggaaaaaccatgctccatctaagaagctgttccggaatccttcaataatatagaatagtggattcaacttcagaacaggcactaattcggggtggctttgaccgagtttcgcattaacatcccaaaaaattggcaacaagaaaaacaaaagtcttgttacggcctgcagcaaaaattgataatctctaatcagcacactgatcgttgagttaaacaaactaaacgaaaacataaaagcaatcatacagatgaagtaataaatatattgtaaccaatgcacactcgggaacacaccattaactaggagtacaatgatataaatcaccatcatgatcatataactaaataagttagatgcaattgccacggacggtagagaactaatcgggaagttcattttagccaccatattaatgcgcttaaatacactatttgatccatcaagtatagttggactgatgaaaaaccatgggattaatcctgccagcatccaaataataaaaggcacttcgcccgctccggttgtcacaggaccgccctttctaatccccataccaaatacgaaccagtaggccagcatttggataagcggatttaagaactgccataagacacctaaataattcatttgatatttagacttggtttcataagccgccaatcttaaaattaaaggaaatgacgttatttgctctctgagtatacgcaacaaatcattcattttttatcttccttagacttaattgtttttgggaatctttctgtttaaaatttgaaagcaccgctgattattgtaacagatcctgcattttttttcacttctcaacaagtatctaaaaagctgccgaaaaatcgacagctatacattttataaaataacctaaattattcagctttaaatacagtattaacaaccttttcagatgaacgtcctgactctaaatagcaaaacttatcatagaaaggaccaaaagaaaccggaagcttataatcaggcgatgagatctgcttgatagcctcaatcgtttcttcagtagtttttaccaaaggaccaggagcttctttttcaaaatcaaagtagaaaccacgcaacttgtcccggtaggtttcgatgtcagggacaaagaatagcattggccgttttaaatttgcaaaatcaaagaatactgaagaataatcagtaatcagcaaatcagaaaccatatacaattctcgaatatcctcataagcagaaaaatcatatgcaaatccttcaaaaggacctaaatcaaaattctcagctaccagataatgcattcttaagattacaatatattcatttccaagttcttgtctaagttgatgcaaatctaaatcgagatcgaacttataacgcccttttgcatagaactgatcatctctccatgtaggggcatataaaataacctttttatcacgaggaatatttaacctactctttatcaatgatattgtttcctcattattatcattatgaagaaaatcatttctaggatatccagattcaatcattgtcttgttaaactgaaacgcccgtgtaaagatctcagttgaataaccatttggggaaatcaagtaatcccaattagaagcttccttgataaaattccttttatattttttggtgtttgtaccaggcatatggacttcttccatatccattgcaagtctttttaaaggtgtgccatgccatgtttgtaaatatgttgtatgactaggtttcggaatccataatggaagccggctgttaacaacccaatactcagctcttgccatagcgaagagccattttaatgagaggcgattaatgtaaggaattcccttttcatcaaaaggcgctgaatattgtttatttacactccaatacattttatactcagggtggttttcccgcatatattcgtaaatcgctctcggattacaactgtattgtttcccattaaaactttcaaaaatgactgttttccttttaactggcattctgctagccatcatgaatagagatttgtatgttttagtgattaacttgtttctcatttttgtgatcttttttatttttgatactaatctcttcttctttcctttaataaagtatttcatccttgttttcaggctatagtcgtttactctgatacctagagtctgctttttctttttcttaaagacttcataacgaactggtgcgttgtttgttttaataatacttactaatccttttaatttgttttttcgatctcctaaaacaagagcagtgctgttgaactgaatatccgttccttcatcgtcattgcatatatactccataaaaagacgataaacataacgtttttcatttgagaaaggaatttctttcaaaggcactttcacttcaaaatcatacagttccggaacaaaaccatctgctctcatgttttccaggccatgtgtttttctttctagcttgattggaaatttttcctcaataggtgtttctccacccttttttaaaataaggttcaagttttttatccgatattgattttcggaactcaggtaccccgcataacctgttatgcttatttcttcagagctaatctcgatttgatcaaatctgatgattttggcctctcttttcaccttaatagaaaagttgcctttatcagttgtataaggtaaaatcaaaagttctgtggtttgatcgacatgaaaggcgcgctcaattgaatttacttcagcagaaagacgcttcaagagtggttcctgctccgcatcttcatatttttttcgaaattcgacataaaaatcatatgtttgtcccatttcaacaggcataggcaaaacatgagcatttatctcagttttatactctaatgagccagtgttttgaagcggaaattcagattccgttcctgaacgtctctctttcagctttaaaaataactggtaatcctctaaaaattggtgttctgaatcaattgagattaacaattcaagacttcctaaattgtttttcaagcttttcaaaatacatttaatcacagtgttttcaatcattacttttttctgctcctctgtataaaagctctttcctttttgcttccttttattagtgtcaactactaaggacattaactctcttttatttccgtgaccctccaagagaaattgcctttaactgttgtatagggctctactctatagccattattagtatctatactgtttcctgacaattttgtttcttcactcgaaagtcttcgcattgttttaatatggccatttgcattgaaaacaatataaaaatcaataacttgggttttattagcagctatcttttcaatatttacatctttttcgagatcaattacaaacagttgatcattttgtaagtttgttgaaataatttcagccttattctttctgtccaagcccactaaacgtatttttttaatatcattatgatcaaaattctcaatgtcaatttctattttagttttatcaaaatcctcagtataggaactaatagaaggatctttttttccaacctttttagagaacttctctctttctattcgcacctcaatcatctgattaagagcaaaagcccaattttcaatatagttgggtcttgaatatttttcagccattttaaaagcttgttctgaaaatttttgatgagtactttcatctttcatcaaagagataatagcttgacccaatttctctatattatactgttcaatgacatatccatttgctccgtcagtaactaagctccttgctccgtaatcataatcgtatgttacaactggacatccattgctcagtgcctccatatttgatagaccgaacccttcaaaatgagaggttgaaatggttagccaagctttttgaaactctgagtcagggttatccgtatagcctttcaaaaagacattgttctgcagtttggtatcttcaatttctttttttattttttcgaaatcttcacccgatccgaatatatcaagttttgcttcaggaatttctttcacgactaaactaaatgcttttactgcatgtatcagatttttcatagatgcaagtcttgaaataatgacagctttgtatttttcactcggcacattcaatacagcgggatcaagaggcttatcaattgtatgcggagtaaagaaaaacgtctcttgttcccctgaaatcaatttaaaatcttctagctgctcctcagttataaaaaagacagcatccaaattatacatctgactaaatacttctttatagcgacccttaatttgatatttattgctgccgtaatgcttgttatgaataattgctccataataggaagaaggtgattttttcactttaaagacatgtttgtcttgcggtctgctgtccactaaaaacaacttaggtttatcattttgtttttgcagatattctatccaatattgacgcagttccgattcatcttttacttttatctcaccctcaagggagtaccaaataatatgagataattgaacatctttttcttcattgttccatacatagagtttgtctaaatatacttgattttggtcattaatatattcctgcagatacatcttgtttagctgcacatcataatgagtaacgagaactaagtttccgttcttcgtatattcctctctctttatgagctggtttttatcattccaatagtcgacgtaccggatagtttctccatctccgtagtaaactacagacatttcattgttcttcttaccaaacaatctcaacagagtttttgcaaatttccccattccaacttgcttttttatctggtcaaggcctatcctttcttcgtatgatcttttcccatttgttctaacacttaaaaaatcatcgaatagattaataacacttgtgaattttttatcaatcttaccgttgctgtacaattcatcaatttttgaagacaactctaaatcaaaacgaaacgttaagaaaaaggtgttttggttacactcttctccaaataattttgaacgcaataataatgatttcgtcagaccgccataattacttggcagtccaccagagataaaataataatccatgtcaggaatttgttttatattagattcactcaccgcatgtaaagacaattttttactccctttcggcatctagaatatatgatcattgaaatttatatctacccggatactttagtcacaaaaatcaatgtaagcatcaaaaagtacttcttatttcaataagaagtactttaattagatattgaaccaatgatatcaggatcctaaattataaaccagcaatttcctctttgatctttgttgtagagatgccttctgttcttgggaggtaaacaacctcacactgatctttgagaaagtcaaatttaccttcccagtcatcccccataacaaaaacatcaatattatgatcaataatatcttgctttttttgctcccaattcttttcaggaattacttcgtccacatatcgaatggtttctaaaattaatttacggtgctcatagctgtgataagcttttttttgcttttgtaaattgaattcatccgttgaaatagcaacaactaaataatcaccaagctgctttgcacgctcaagcaatttaatgtgaccccaatgcagtaaatcaaaagttccatatgtgataacttttttcatttaaagaaacgctccttcctaatgttaaacactattaaaaacactactgacgttagcgattaaattctaaaaacctgtttgtattccttatatcgacatatttctcgtatgtcttcactgatcattaattatagcataccgcctaaaaaaggttaagtactcatgaggagaaaaacattccaaaatatgtaattacactcagactccattggcaccaaggtctgttgttcattcgttcattcaattgtaaaattggaaacatatttaaatttaatgtaaagataatgttaatcctttgttgaagatttatgttaaaatataaggtagcttgattttgcttttagaaactctcggtttttaactatataaatagaatcttaaaggaaggaggagccagacatgcaaacagagactattcacaatattccttatgttaacagtaacttaacatcatttatcgattacctagagaaacattatattgatcaaaagattggtgctgtcatttccacagtcaaccctgaaattgcatttgcagctattaaagatcgggactactttgatgtactatcttcttcaaacttcattttgcctgatgggatcggtgtagtcatgatgtcacgtttgactaacaacaggcttcagtcccgaatcgcaggttacgatgtttttaaagaacttctgggcgttgctaacaaaaagaaaaaacgcatatttctgtacggtgcgaagaaagatgttataaaaggtgttgtatccaaaatttcttctgaatacccaaacattaaaatcgcaggttattcagacggttatgttcaagatcgcaccctagtggcaaaacaaattgcaagagcaaatcctgacatggtattcgtagctttagggtatcctcatcaagagaaattcattcataactacagacacttgttccctaaagccgtatctataggtctaggaggaagctttgatgtatttagcggtaatgtcaaacgggccccttcctggatgatacgtttaaatttagaatggttctaccggttaatcttgaatccatggcgatggaaaagaatgcttagcatcccaaaatatgctttaacggttttaaaagaagaaaaaaacaaaaaaactttctatccaaagcctgaaaaagatcatacaaaacagatttaaaaacaaaactttcaaataaatggatgataaaaatgaaaataagatcactactggcgaattgctatttgtattttttatcagcaatcgccttttttctgcaatgggtgaaacctgaaagcaaagtgaccctcctgatctcattcgaagcaaacgcaaaagcgattcttgaggaatatgaacaaggacaatactcttataaacttaacatcctgtatacccagcaggcctctgctattgccgagagcttcccgaatgtagatgcatatttattacaagaaaaaaaccctatccatctcattaaagctgtatacctaatgtttaacagtaaagtgatcataacagataattactttctattaacaagtgtgttaaataagcggaagcaaacgaaatgtatccaagtatggcacgcaaatggctcactcaaaaaatttggtttggaagacattacaaacatgcaacggacgaaaactgatattaaaaggttccaaaaagtatacagttcgtatgattatttaactgttggctcagaagagatggcaaatatcttcaagaaatcatttggaataaaggataaccaattattaaaaataggtgtacctttaacagacccttattaccgagaaaacaagaaaaaaatttcagatactctaaacatacaaagaaaaaaaataatcctctatgcaccgacgtttagagattataatatgcaatcaattcaattgccttttacagaagaacaattaattcatcagttaaaagaagaatatgttttatttgttaagctgcatcccgccattcagaacaatattgatattaaatattccagtgattatattaaagatgtttctaactatgccttgtttgatctactcatggctgcagacatattaatcactgactattcttctgttccctttgaattttcgattttaaataaacccattcttttttatacttacgatttaaaactttatcaacagaagcggggattggttgataattatctttccataatacctggaagagcctgctatgacagtgaatcattaataaatgaaattcaaaccccatttaattattccaaaataaaagttttttccgatagatggaataagtattctgatgggaattcaagccaaaatttattgaatttcatcgaaaatttaataagctaaatgatgacacttgttcaaaacagaacaagtgttcttttttctattgaataccgaacgtatgtttgctttaatgtaattagttgcttatggcagcaaataataatagaggtggtaaatttatgagaaaaaaagaactgtttgatttcaccaacatcacgccaaaattatttactgaactacgtgtagcagacaaaaccgtacttcaatcattcaatttcgatgagaaaaaccaccaaatttatacaacccaagtcgcaagtggattaggaaaagacaacacccaaagctatcgcataactcgtctatctcttgaaggtttacaattagacagcatgctgttgaaacatggaggtcatggtacaaatattggaattgaaaaccgtaatggcaccatttatatttggtctctatacgataaaccaaacgaaacagataaaagtgaattagtttgtttcccatataaagcaggcgcgactttagatgaaaattctaaagaacttcagcgattctcgaatatgcctttcgatcatagggttacacctgctcttgatatgaagaatagacagttggcaattagacaatacgatacaaaaaataataataataaacagtgggtgacaatctttaacctggacgatgcaatagcaaataaaaacaatcctctttatactattaacattcctgacgaacttcattatttacaaggtttctttttagatgacggttatttatattggtatacaggagatacaaacagcaaaagctatccgaatctcataactgtatttgattccgataataaaatagtgctgcaaaaagaaattactgttggcaaagacttgtccaccagatatgagaataacttccgtgaaccggaagggatctgtatgtacaccaatcctgaaactggggcaaaatcattaatggtgggaattacaagtggaaaagaaggaaatcgtataagcagaatttatgcataccattcttatgaaaacttcatgaatcatgtacctatgcttcgatcccctttattaaaaaccgtggggcaccaagatacacctccagaaagatttcaaccatttattcaaaccttcattttagagtataatgctcaaaacaaaaaatggatggttccgacttcaggttatttaccatcttacacatcaaatttagtccgaaatattactatcaatgcagatggaaacttgcaagtcacattaaatgaacgctatattagtttactgcatcaatcgatagaaggagatttccgcttaaaacaaaaggatatccgaatgggatcctggtattttgccggcggagaaaaatcaaatgtgcttgaaataggttttatgaaagggagtacaaaaatcagacccgatgatgcagccatctcaaatgcttcaagaatgagtatttttatgattgttgcggacaagattgaggtgtgataatcaaataggctgtagctatttaatagctacagcctatttgcaactttctaagttttttatcgatattccggaacatcaaaataaagtgtataaccgtccagcaatgaatacaggctgtacatgcggtttacttgtttgtacgcccagccgatgtctgttgcgtattgatgtgtcgctgtagctgaccatctcattttgtacagtgtgtcttgattgtaagctgtgttgtggatatacgatgagcctatgaatttagctccgccgataatggccgcttctggtgtgaaccagccctgctcgtacgcatatttggctccgtagtaattcggattgctgtcgtatgctccaattccatacatgttgtatacggtttttccgttataggttaatccattggctaaagcggatgtcccgtttcctgtttccagaagagcgtgtgagattaaatacagttcgttgatgctatattgattggcggcatcgataaatgcctttgctctccctgtcaggatgcctttacccgcaagcactttctgatttacctcagtaacgctgagacccgctgtctgtgacagcttgagaaattggaagtagtatttgctgtctctggaaaagttattcggatccacgtattgaactacttcatcactgcttgcgtttcgccagcccaaattgatcttagcccagccgtttatctgtccgatgactttcactttatcgccttttttaaactggccgatcacgtttgtcgggctgacttccggcgttgaccggatatttagtacatcagccgtaacagttgatgttgctgtattaatgtacgtgagcgatacgtaagccgctccgtctgtttgcggacttactgtcatttgtttttggaccatatcacgaagcgagagattgtagtttgttttcatgatttgcgggccgtttttgatcttcacgatagatgatgtccatccgtataattgttttagcttcgttgatgccgcagcagctgtatcattgcctgtgaactgctcatttacgctgattttataaagcgtattgcttttcgttgtatagctcggggttacacttttcgatttaagataggttaacccattgttcaatgcggttttgctgctaagctgtgttgtcacgattttgtattgtgtatatgcagtctggcctgtttttgatgttgtgactgcgatatgattttgtttgaaaaatgttaaaacgcggtcaatctcttcttggctgatgatagcttcagttgtgatttgatagctgctcgcagctgtctgaccggttttctggcttgctactgatatatgattcgatttgaaaaacgtgagtgcctgattgactttcgtttgatcaagcagagattcggttgtgattttaaacgtgtcagctatttgttttttgacggatttcgcagaagcacttagctgatttttctttaatatgttcaaaccctttgtgacttttgcttgatctgatgtttcttctgagatgagctgatattgattttctgctgttgatccagctgctgtttttgcagcttttacttttttctgagcaaagaaggctgctgctttgtttgcttgctgctcgcctaaaatctttgccgtcgtgatttgataagctgcagacgttgtcgtttttttgacgctggatgacgtgtaatgccattttttctttttaaagaaagtgtctattttttggagctgctgttttgttatacccttcatattcacggtatatgatgtgctttttccaacctgttgataactgccggatacgccagtgtttttcttgatttggctgatggcgtcctttactgtactcagccctttgaaataagctgattggacattgtatgactcaacggttgttttttgattgatggacttgtagctgcctgtgatgccagtgctctgtttcagctgctgcaatagagttttggcattggcttcacctgaaatggcggcagttgtgaacgtataataggcttgccctttcactgtttcctttaatgatgcctgcagcccagattccttttggaaggcgtttttgatctgcgctgctctgctgtctcccacgattgtgccagactgaatggttgtgacagacaccgtgtgtgtgatgggctgatacgagcttttaatccccgtttgcttggccaggctctggataagcgccttgacttttgtctcatcagcaatgtctgatgtcatgacgttcatatagggctgagctgctccgtaagcttttacagcgccagccactcccgtctcctgtttcagctttgctaggatagtgttggcctgtttttctccggagatggcacctgacgagatggtgacatatggctgtttgcttccaacaggacttgacgttcctgtaattgatgtctgtttggcgagtccgctcagtattgctttcgcttctgattcgctatgaatgcctgaggcggaaatttggtaggtcgttgttgtgcctgaagcctgataggatgcatcccagccagtatctttttccagtttggcgacagcttgtgaggcttggctttctgtactgaacgtattcgacggctctactttatatagtgagtagtcggtatacgcggctgcctgggcagaaccagacatggcaaaaaaggcaagggacgcggcggatagaagcataggtgcgattagtctctttttcattccttctcctctttcttattctatgagtatataaaactagtttatttatcggcacgcgcatgcttcatttataggtgaatcacttccattttctaataaaaaaacttaacctcgaagtgagattaagtttaaatatgagacacgataagggtacaagttccttttatcgtaaaatcgggcatttgagccggcaaaataaagtgatcaccttttttgagcggacatgttttgtcctcatacttgagcaaaccgcttccttctatcacgctgcaaatcagaaaggattcatcctgagccatttcagcttcgccattgatgtcccatttataaaccgaaaaatattccccttggacaaatgttttaatggttattccttttcttgattctgtcgattcatctatatacccgtccacatggggaaccgtggcggcattgaccgctttggcaaaatgaagctctctcggacttccgttgctatcaagacggtcataatcgtacacccggtatgtggcatctgaattttgctgagtctctaaaacaagggcccccttgcacaatgcgtgcagcgttccgctcggcacataatagaaatcacccggtttaattttgattcttcgcagcaggccctcccagtcaccgctgttgatcattgtgacaagttcggtttttgagcgggccgtatgcccgtaaatgatttctgcgttttccttacagtcgataatgtaccagcattccgtcttgccgagttctccctcttcgttttctccggcatagtaatcatcagggtgaactttaattgacgtatcttccttcacatccagcagctttgtcagaagcggaaaccgatccccctctacgccgccgaatacttcacggtgctcttcccaaagctcgatcaatgtctttcctttatacgggccatttgcaacagtgctcggtccttttggatgagcggaaatggcccagcattcccccgttgattctgaaggaatactgtatccaaatctatctcgtaaagcggttccgccccagattttttctttaaacacaggcgttagaaaaatcggtgattgcgtcatgatccgtacccctcccctgtaaataactgatcatcattttcccggtgcgcccctcttacaaacgcccgtataagctgcctttttcctatgacaacatatgtacaaagcatcatcttttcattaccccttcaaagaaaacgcttcctatctattatatcacgtcgaaaagaagctttgtttcagccttttcctcgataagaataattctccttttttgatacaaattaataaaaaccgtcaatatgtttaagaaggagagaaactatgcaaatcgactctgatctccagaacaatttagacacactgaaaaaaacattgggacaaaacgacgatatgatgttttatacatttgctttcggagatagcagacaaaaggcgtgtttactgtatattgacggtctgacagagaataaaatgctggcgcaatacgtcatttctcctttacaaaaagaggcgttggcccataaggaatgctcgattgaagacttatccgccttttttttcggctttcaccacagcgttgtttctacaatgaaagaaatagagcagctcgttttttcagggcaagccattttgctcgctgatggctatcgcggaggattagctttcgacacaaagtcagtcgcaacacgcagtcttgatgaaccctcctccgaagtcgtggaacgcggccctaaaataggatttattgaaaagctgcggacaaacacggcgcttttgcgtgaacggacgagtgatcctaatctcgtcatcaaagaaatgacactcggaaaaaggaccaaaaagaaaatcgctgtcgcttatattcaggatatcgccccagattatgtcgtcaaagaagtgtttaaaaggctgaaatcagtcaatatagataatttgccggaatcggggacgcttgaacagctgattgaagacgaaccattttcaattttccccacaatattaagcacagaacgaccggaccgggtcgaaagttctctattagaagggcgagtgtccatattagtggatggtacgccgtttgctttgattgtaccggctacggttgacgaatttattcattcgcccgatgattacagccagcgctggatcccaatgtcacttgtacgccttcttcgttattccagcatcctgatcaccatttatttgcccggtctgtatatttctctcgtttcttttcacaccgggctattgccgactagaatggccatttccattgcaggcagcaggcttaacgtaccattcccgccttttgtagaggcctttatcatgatctttacgatcgaattgattcgagaagccggattaaggctgcctaagccgattggacagacaattggccttatcggcggcgttgtcatcggacaggcagctgttcaggcgcaaattgtcagtgcgcttatggtcattgtcgtttctgtcacagcactggcatcctttaccgttccttcatacgcctataactttccgctgcggatcattcggatcggggttatgataagtgcaacagcgcttggcatgtacggcgttataatggtttatctgtttgtgatcggccatctcatgcgcctgaaaagctttggccaggattacattatcccgatcatggcgcagcctggacaggatttgaaagacacagtcatccgtattcccacgatgtttttaaaaagaagaccgacacgaaacgatcccgaagataacatcagacaaaggtgatggctatgaggaaatcagagcataaactgacatttatgcagacgctcattatgatcagcagcacattgattggtgccggggtgctgacccttccccgctcagccgccgaaaccggcagtccgagcggatggctaatgatactgctccagggcgttatttttattatcatcgttctgctttttttgccttttcttcaaaaaaacagcggaaaaactctttttaagctcaacagcattgtagctggaaaattcatcggctttctattgaatttatatatctgtctatatttcattgggattgtttgctttcaagctcggattttgggagaggttgtcggattctttttgttgaaaaatacgccaatggcagttgtggtgtttatatttcttgcagttgccatctatcatgtaggcggaggcgtttattcaattgcaaaagtatacgcttatatttttcctataacccttattatttttatgatgcttctgatgttcagctttcgcttgttccagcttgattttatccggccggtatttgaaggaggctatcaaagctttttctctttattcccaaaaacattattatatttctccggatttgaaatcattttttacctggtcccctttatgagagatccaaagcaagtgaaaaaggctgttgctctgggcatcgcgacttccacattgttctacagcattactttgctcattgtgattggctgtatgactgtggctgaggcaaaaacggtgacatggccgaccatttcccttattcacgcattagaggttccgggtatttttattgaacgatttgatttgttcttacagctgacctggacagcccagcaatttgcctgtatgctcggatcctttaaaggcgcccatatcgggttaacggaaatctttcatctaaaaaataaaaacaatgcatggctgctgactgcaatgctggctgcgacgtttttcataacgatgtatcccaaggacttgaatgacgtgttttattacgggacgcttcttggatatgctttcttaattgtgattacaattccattcttcgtctggtttttaagctggatacagaaaaaaatagggagggggcagctgcaatgaaaacagcatcaaaattctccgtcatgttttttatgctgctggccctctgcggctgctgggatgtcaaagatatcgagcaactatccttcgccagagggctggcgatcgatgagacaaatgatcaccagtacaaactgacgtatcaaaatcttcttccccaaagcgaagacagccaagcatccggaaaacccgaatttgttaatgtaacgtcccacgggaaaacgattctggaagcagtcagtgatgtatccatcaaggaccctcctgtttatagcgatcatttaaaagtgatccttctgggagaaaaactgatgaggaatcaaaatgtagaccaagtcctcaaccactttatccgggatgatgagctgcggcgaagcagctatttgatggcagccagagggaatgcagctgatgttttcacaaaaggaaaccccaatcagcagcagccgatgccctccgaaaaactgattgatttgacaactcacagcggatataacggtaagattatgataccgctgcgcatcggaagagcttctgtctactctcagaacgggtacagttatcttattcaagccgtgaaaaacgaaaagggaaaagccaagtatgacggagcaggcattatcaaaaggggcagcaataaactcgttgggtttctttcagctgatgaaacccaaacactgtcatgggtcatggggacgatccaaggcggtgtcatgccgacgacagataaaggacatccgattacgtttgaaattaaaaagtcgaaaacgaaaattaagcccgtcattgaaaacggaaagcctgtctttcatatttctgttaaaacgaagggcatcctgacagaagaccaaaacccgaatgaaaactcctttagcaaaagttatttgcacaggctggaaaacatttttgaaaaaaagcttgaacgagatgtaaagcaggtgatggataaactgcagcacgagtataaaaccgatccggtctttttatcagaccacataaggattcaacaccctgactactggaataaagtaaaagggcattgggatgaaatattttctgagactgattttaagtacgatatttcttttaaaatcattaactttggcacggtgggaaagtaagcaatcaaaagggtgcgcatgatcgcgcacccttttttatgttccgacagtctgctgttttccggccgctcctccctgtccgtttttgtcccgtaaatcctgctcaatttcttcaaggcttcttccctttgtctctgtcactttaaatcggacaaataagaacgccatgataccgatcgcggcataaatcaggaataaataactgattccgatcgcttccattaatattggataggttaatgaaacaatcagtgtcccaacgtgcaacattaaggtcgaaacaccggtcccgattcctctgacgtgaagcgggaacaattcaggaagcatcacccacacaaccggtccccagctgaccgcaaagacaacgataaacacgcctaaacaaatgacggtcgtccatgaggcagccggagtgttatcgaaaaagagatttactaaagcgagaacgatcaagctgatcaccatgcccgcattcccgaatagcagtaacggctttcttccaatcttgtcgatgattttaatcgctactaatgtcatgagaacattgactgtgccgattccgaccgtgcctaaaatcgaagcggagtttccgaatccgacgtttgtaaaggtctttggcgcatagtagatgatcgtattcgttccgataaattgctgcaaaaaagcgagtcccaaacctgcaataagcgctgggcgcacccatggatcgaacagctccttcagaccgccttcatcctgcttttccgcttcttttatatcatgtatttcctgatcaatatcttttgtgccacgcaatttttcaagaattttcttcgctttgctttcttcgccattcgtgaacagccagcgcgggctctccggcataaacaaaatgccaataagcaagagcaatgacggcacagcagccaatccaagcatccagcgccacgcttcggcatcggcaaatatgtaattgacaatgtaagaaagaaggatgccgaccgtgatcatcagctgattcagtgatgacagcgccccgcgtttatgttttggcgccagttcagataaataaaggggtacgattgtcgtcgatgttccgactgcaagtcccaaaatgatgcgaaacagcaccatgactcctgtatttggggccagtgccacaccaagaccgcctatacaaaacagcagcgcggctgccataattgctttttttcttccgaaacggtcagtcagcttgccggccgctcctgagcccaatatcgccccaaccagcaaggagctgacaacaagaccttctgtaaacgcgtttaagcctaactcctttttcataaataaaatagctccggaaatcactccggtatcatagccatataacgcgcctccaagagctccgaaaaaataaagccatatatttgactgctttttcataaagatgactccctttctccatcagctgcaatgacattgtctgtgggatttttttagaaatcttttagcctctttttccggccattaaacctttttatttttctgatcataagttttccaatcatttacttgtatttttttcaatgtcgccgaaacattttacctgctgcggcgtccaatataaggtgattcagtacattatcgttatcaattttcaaaaacaagaacttataaatataggaatatttatcgaaaaatgtctttcgagtagttgccccatggcaaatagaatggtacgcttcaaatattaaagaaacgtgaggtattgatatatggaagaacgatcacagcgcagaaagaaaaaaagaaaactaaaaaaatgggtgaaagttgttgccggattaatggcttttttagtcattgcggcaggctctgtcggcgcctatgcttttgtaaagctgaacaatgcttctaaggaagctcatgtcagccttgcacgcggagaacaatctgtaaaacggatcaaagaatttgatcctggaaaagattctttttctgtattgctcttaggaattgatgccagggagaaaaacggcgagaccgtcgatcaggcaagaagtgacgcgaatgtgctggttacatttaatcggaaagaaaaaacagctaaaatgctgagcattccgcgtgacgcctatgtaaacatcccaggccacgggtatgataaattcacacatgctcacgcttacggcggcgttgacttaactgtgaaaacagttgaagaaatgctggatattccagtcgattatgtcgtagaaagcaatttcacggcttttgaagacgtcgtaaacgagttaaatggcgtcaaagtaactgtaaaaagcgataaagtcattcagcaaatcaaaaaagatacaaaaggtaaagtcgttcttcaaaaaggaacacatacgcttgatggggaagaagcgctcgcttacgtaagaacacgtaaagcggacagtgaccttttacgcgggcaaagacaaatggaagtgctgagcgccattatagataaatcaaaatcattgagctcaattccggcttatgatgatattgtggatacgatggggcaaaatttaaaaatgaacttatctcttaaagatgccatcggcctgttcccgttcatcacttcattgaaatcagttgagtctattcagctgacgggttatgattatgaacctgccggagtctattatttcaaattgaatcagcaaaagctgcaggaagttaaaaaagagctgcaaaacgatttaggtgtataatgaacgggatggcgattacgccatcccgttttacatatttccttgttgaaaattatcaaagtaacgtttagccttaatttatatggattatgtttcacaggcaagctgaacatactacacgaagcagcttcatttttaaggaggttcccctacatatgaaatgtattgcgattgatctagacggaacattactgaataaagaaagcgtcatttctgcggaaaacagagaggcgatcaagcgggccgttgatgccggcatcctcgtcaccatttgcacgggaagagcgacatttgatgtaaaagcgctgctggatgacttggacatccctatcattgcagctaatggcggtacgatccacgacacgggttaccgtttgatcagccggacattaatggatcaggaagccggtaaagcgattgctgattacttactttcaaaaaacatttactttgaggtatatacagatgaccatctgctttctccttttgacggcgaagctaagctgcacgcggagcttgacattctaaagagcgcaaacccaaacgagcagacggatgacttgtggcaaggagccatgactcaattcaaacagtttggcattaaaccaatccctcatatcgaatcggtttttgacggcggtgaaaacatttataagcttctttgcttctcctttgatatggacaagctgaaacaagcgaaggaagaactgaagcatcataaaaaactggcgcaaacctcttcaggaaaacatattatcgaaatcctgccggcctcgtcaggaaaaggacgcgcgttaacaaagctggctgacatatacggaattgaaacacaggatatctatgcgatcggcgatagtccaaacgatttgtccatgtttgaagtcgccggacaccgtatcgccatggaaaatgcgattgatgaattaaaagaaaaaagcacctttgtcacaaaaagcaatgacgaaaatggtgtggcctactttatagaccagcttctttcggggcaatatgcataaagaaaagactccagagattggagtctttttcttttattgcacccgtatacttcctgcgtatttatccttccaatatgtgctcgtgttcatattggtaatggtcacgccgtttgataatgtgacatgaacaacttgtccgtttccgatatagatggagggatttaagcttgttgattgaaagaacacaatgtctcccggcttcaggtccgccttctcaatcttagttccggcattgtactggcttgttgcgtatcgaggcagggaaataccggctgctttctggtatacatattggacaaatccagctgtatcaaatcccgtctcaggtgttactccgccctgtttgtaaggcacttctccgacataaagcgtcgcttcggaaacaatcggattttctttcgggattgtcaggttgtcaaatcggcgaatacccgtcatcttcgatttccagtaatcctctgacaaataggaaatggttactttttctgaccggcttgcctgaatgaacctgcctgcgcccgcataaatgcctgcatgtgaaattcccgttttatacgtattgctgaaatagacgacatcaccaggctttatgttctgaggggctaccttctcgcccactgcccactgctgttcggctgatcgcggcagataaatgccgagtgcctgttgaaacacatattgcacaagccccgagcaatcaaagccctctgacggcgtgcttccgccaaacacatatgggacaccgatatatttttcggcctcctgaacgacaggaacatcagccgttgccggatcggcagcgattcgtctcgccccgatataagttccgctccaatagctgctttttttgtaattggtgatgataaccccttttgactgtgtactgtgaaccatttggccgtctccgatataaagggcgtcatgtgtcggaacagtgccggtgcttccctctttcttgaaaaacaaaatatcacccggcttcaggttttccggttttacagctgttccgattttatactggtcgtttacagatctcggcagatgaatatcagccttactgaacacatattgtatcaatcctgatggatcgaaaccctctttcggcgtttccccgccatatttatactgatatccaagcaggttttttgcttcgctgacaatcaattctgatgatgtatcagcttccgcaatctccgcttttgtcataattggaaccaaaaaacaaatgataaccgccacaagcaaaaacttcttccagtttgccagtgtgttcacttttattatctcctcctctttttgcagttttaacatcggtatttttttgaatatgttaagagactttttaatatttttacagaatgaatatgctgggcaaataaaaagagagtgtctcatcagacactctcttttttgaattatttattggcgtttaccggttcttcctgctgctggattttattcatttccatatcaatcttctgtttttcctgatctgtcagctgatcattgaatttaaaagctgacataaacatgaacacgatggctacggcaacaaacggccagatggctttgacaaatttcatctttatcactccgattatttagattttagtttgtcactatgatcaatatcaaacgtcagttttccgtcttctactttccaagcgaaattagagtctttcgtcagttcgcgaataatggttttctgtttaaggctgtcttttttcacaggcgcaggtgtcgcttcatggatatcgatcggtgtcacttcaaagcgtcctgttccatttttcttcaggtgatactgaaccagtgcactgtctcttgttctcgtccagccttggtcaaagacaaagttgccgaggctgtagaaaatgacggttccgttatatacttcaatcggttctaagacgtgcgggtgatggccgacgatgatgtcagctcccgcatcagacatggctcttgcaagctggcgctggcggtcatttggatcattgtcatactcttgtccccagtgtgactgcacaacaacaatgtccgcatgttttttcgcttctgaaatcatagggatgaagatttcaggatctgcgggcagcacgcccggcgtattctttttagccgcgaaacctttcccggacacatcggtaaagccaagcgtcgcaatcgttaccccgttgactttctggtacgaaattttctttttcgcatcacttaagctgtatcccgctccaacgatatcaagattttgcttcgcaaattctccaagcgtatctttcatgccctgaacgccgtaatccattgcgtggttgttggcgctgttgagaaccgtgaaattcatatccttcaagactttcactgattccttattcgtctgcagatgaatctctttatctgcttgtttataattcttttgataggttaccgggttttcaaagtttcctgctacataatccgaggctctaaagatcggttcaacatattgaaaaatactgtctgcccctttttgctccgttactttttcaacatagcgtcccatcataatatcgcctacaaatgaggctgagagtacgtcgtcagaatacgttttgaccttcggcgtttccgcttttcccgcccacatgaaagcgaacataaggacaaaaacgatcggaatggcaataaatacgtgcttattggttttctttttttgctgttttgtcagctttagcagcttttcatgaaagctcagttcttttttcatcgtttgacacaccttacattaaattaagtagtaaacaaacatgatagcaaaggtcgctccgctcaatagcagcgtgcttccgaacgtaatggttaaaccttgtttctgaatggtattggcaattaaacctggcacgatgatgccgattcctcgaaattctgcgatttcaaatggtacaatcgggtatagaaaatcaaacgcgatttttaggacgatccctgttatcagcatggcagcgaattttctgcgtccgtacaaaatcataaatttggataaaccgtatttcacaatgacatacgtgagcaagctcactagcaaaacaagtaaaataaagaccggctgattaaacacaagtcctaaatatcccggtacaacaagtcctgccggcacgatccctgttttttccgcaaaaattaaactgagtagtacacctaaaattagtgcgatgtataaatctgatccgaacatgtctgcatttccccctagcttacgagctgctttaccttgtattcgtggattttttcaattaaaggctctgcggcaccatgaatattgccgacgccatatatgacacggttgtgcattcttttctttaacaattccataatttcatctgttgacttatactctagatcatgcagtttgtctgcaggaattttgccttcttcgtaggcttttacgatcggttctgttgtttcaccgattaagatcagttcacttgcttcaatataaggcaatacgtcatttgcgaattgctgtgtccgatcgacacggtctgcgcggcagttcatgatgatgatcggatcatcggtcgggtaaccgatttcttttacacgtttccatatattcaaagtagaagaagcgtcgtttgcggcaaacccattaacaaagtgcccaggctcgctcggactgatcagcggaagaattctcattgctcccggatctggcggcgcattcagcattcccttaaatgctgtttcttcgtcaatgccgagtgcttgagccacacccagcgccagagaagcgttatcagggaataccatgtattcaaatttacgtaaatactcatctgtaatttttgagttatcagcaatgatgacttttgtgtttcgttcttttgctttttgtttaaagaactcggtatattcactatctgtaatgacaagatggccattataaggaattgtagcagtaaacgcttctgcaatttcatcaagcgtcggccccatgacatccatatggtcttccaaaacattcacaatgacgccgatattggcctgcagaagttcttcctgaaagatgatttgataatctgggttaacagccatgcattcactgacaatcgcgttagcccctctttctactgtttctctcatgacttctttttgctctccgatattcggcccctgaggtttccgtttaatcggcttttcctccggtgtgtcccagtaaatcattcttgcatctgttcctgttgtttttccaacagtcttgtaaccggcttctattaatattccggttgtcagccttgtcacagtcgattttccgcggatgccgttaatattcacccgaacagggagggcatcaatgtttttctgatgtcgtcgtttttctaatattccgatgaccagtatgacagcacaggctataatgagtaaccacattgcttttcgacatctccttctatattgttgtaaattcattcatcagtatatagaatcactatgaattctcaatcggcattatgtaacataatcttccctaatcgactaagccaaacttctcttttgaaagagattttatacctacaaactgttttctatttttggaaaacagcaggacttataccttatcactttttaaaaaaatcaaagagaatgcgctttcatttttctcctgatatccttctggacgtatagtcacaccctgctgtttgtatttaatatgcatttcaaatcaatctttttttcagcctttgttatcaagcatttcctgctatcatgcgtgtttccggttcttatgaacacaaaataattttatcctgtttcttaaggacaaggtcataatgtcatcctttctgcatggaataagcaatatgaggcccattccaaaatgactaaggaggttcgagatgaaaacgctaaacatacgagtccgaattctctaacataattaaacattttctgggatgatagtcttttctgtttctccccatttacaggtctaaacgcatgactttgaaacaattttaataaaacttaatatttgttcaagaaatcttcatccatatttgtgaagactttgtcaaaaaaagagtgaaaaccttaaatttttcaattatatatacaatttacaattagatttcttttgatatttttattgctaacttcggattgttcatgataatctatctatgtaaacggttacataaacaaggaggagctgttttggctacaattaaagatgtcgccggagcggcgggcgtttcagttgcgacggtttcccgcgtcctgaatgataacggctatgtacacgaagaaacgcgaacgcgtgtcatagcggcgatggcgaagctgaactattacccgaatgaagtcgccagatctctatataaaagagaatcccgactgatcggacttttgctcccggatatcacaaaccctttcttcccccagcttgcccgcggtgcggaggatgaattgaaccgggaaggctatcgccttattttcggcaacagtgacgaggaattgaaaaaagaacttgaataccttcaaacctttaagcaaaatcatgtcgcaggcattattgccgcaacgaattacccggatctcgaggaatacagcggcatgaattatccagttgtttttctggacagaacgcttgaaggggctccttctgtgtccagtgacggctatacaggaggaaagttagccgcccaggctatcattcacggaaaaagccagcgcattacgctcttgagaggacccgctcacctgccgaccgctcaagaccgatttaacggcgctttggaaatcttaaagcaggctgaagttgattttcaggtcattgagacagcttcattttcaattaaagatgcacaatcgatggcgaaggagctgtttgcctcttatccagcgacagatggtgtgatcgcgagtaatgatattcaagccgctgccgttttacatgaagcattgcggcgcggaaaaaacgtgccggaggacattcaaattatcggctatgatgacattccgcaaagcggacttctgttcccgccactttctacaattaaacagcccgcatatgatatggggaaagaagctgccaaactgcttttgggtatcattaaaaaacagccgctggcagaaacggcaattcaaatgcctgtcacctatataggaagaaagacgacaagaaaggaagattaagatgcgtaatatttgtgtgattggtagctgttctatggatttagtggtcacctcggacaaacgcccaaaagccggtgaaacggttcttggcacgtcatttcagactgtgccgggcggcaaaggagcaaatcaggccgttgccgcagccagacttggggcgcaagtgtttatggtcggcaaagttggagacgatcattatggaacagctattttgaataatctcaaagctaacggcgttcgcactgattatatggaaccggttacacatacggaaagcggaaccgctcatattgtgcttgctgaaggcgacaacagcattgtcgttgtcaaaggcgcgaacgatgacatcaccccagcgtatgcgttaaacgcgctcgaacagattgaaaaggtcgatatggtgctgattcagcaggaaatcccagaagaaacggttgatgaggtgtgcaaatactgccattctcacgatatcccgatcatactaaacccagcaccggcccgcccgctcaagcaggaaacaattgatcacgctacctatctgacgccgaatgaacacgaggcttcgattttattccctgagcttaccatttccgaagctctggcgctttatccggcaaagctctttattacggaaggaaaacaaggcgtccgctattcggctggcagcaaagaggtgctcatcccgtccttccctgtagaacccgttgatacaaccggagccggtgatacgtttaacgcagcatttgccgtggccctggctgagggaaaagacattgaagccgcattgcggtttgccaatcgtgccgcttccctttctgtctgctccttcggtgcccaaggcggaatgccgacaagaaatgaagtagaggagctgctgtcatgaaaaaacacggtatactgaacagccatcttgccaagattttagccgaccttggccacactgataaaattgtcatcgcggatgccggactgccggttcctgacggcgttttgaaaattgatctttcactgaagccgggccttccggctttccaagatacagcggcagtactggctgaggaaatggcggtcgaaaaagtcattgctgcagctgaaataaaagcatccaatcaggagaatgcgaaatttctagaaaatcttttctctgaacaagagattgaatacctttctcacgaggagtttaagctgctgacaaaagatgcaaaggcagtcataagaacaggagaattcacaccatatgccaactgcatcctgcaggcaggtgtacttttctagaaaggaagatgaaacatgcagattgaaatgaaagacattcataaaacattcggaaaaaatcaggtgctgtcaggcgtttcctttcagctcatgcctggcgaggttcacgcattaatgggagaaaacggcgccggcaagtccacgcttatgaacattttgacaggcctgcacaaagcagataaaggtcaaatcagcataaacggaaacgaaacgtatttttccaatccgaaagaagcggaacagcatggaatagcctttatccatcaggaattgaatatctggccggaaatgaccgttcttgagaatctatttatcggtaaagagatatcctccaagctgggcgttttacaaacaagaaaaatgaaagcgctagcaaaagagcaatttgacaaactttccgtctctctttctcttgatcaagaagccggcgaatgttccgtcggacagcagcaaatgatcgaaattgcaaaagcgcttatgacaaatgccgaggtaatcattatggatgaaccgaccgcagcgttgactgaacgtgaaatcagcaagctctttgaggtcattacagcgttaaaaaagaacggcgtctccattgtctatatttcgcatcgcatggaagaaatttttgcgatttgcgacagaattaccatcatgcgtgacggaaaaacggtagatacaacaaacatctcagaaactgattttgatgaagtcgtcaaaaaaatggtcggacgggagctgactgaacgatatccaaaacgcactccttctctcggtgacaaagtattcgaggtgaaaaatgcttccgtaaaagggagttttgaggacgtcagcttttatgtgcgttccggtgagatcgtcggtgtttcaggattaatgggagccggccggacagaaatgatgagagcgctgttcggcgttgacaggctggacacgggtgagatatggatcgctgggaaaaaaacggctattaagaacccgcaggaagccgtgaaaaaaggtctcggctttattacagagaatcgcaaggatgaagggctcctgctcgacacctcgatccgcgaaaatattgccctgcccaatctgtccagcttctcaccaaagggtctcattgatcataagcgggaggctgaatttgtcgatctgttaatcaagcgcctcactatcaaaacagcatcaccggaaacgcacgcacgccatttatcaggaggaaaccagcaaaaagtggtgatagccaagtggatcggcatcggaccgaaagtgcttatcttggatgagccaaccagaggtgtggatgttggcgccaaacgagagatttatacgctgatgaatgagctgaccgaacgcggtgtcgctatcatcatggtgtcatcagagcttcctgaaattctgggaatgagcgatcggattatcgttgtccatgaaggcagaatcagcggcgaaatccatgcgcgagaagcaacacaagaacgaattatgacacttgccacgggagggcggtaatatgaaaacggaacaactgcaaacagaacaaaaacggattcacttcgacggagtcatgcaaaaactcggcccgtttcttggtttatttattctcgttatcattgtatctattttaaatcccagctttcttgaaccgctgaatattttaaacctgcttcgccaggtcgccattaacggattaatcgcgttcgggatgacctttgttattttgacaggcggcattgatctttctgttggcgctattcttgccctgtccagtgctttagttgcggggatgattgtgtccggtgtcgatccggttctcgcgatcatccttggctgtatcattggtgccgtactaggcatgatcaacggattattgattactaaaggaaaaatggcgccctttatcgccacgcttgcgaccatgactgtgtttcgcggactgacgctagtgtatacagatggaaatccgattaccggacttggcacaaactacggttttcagatgttcggacgcggttactttttaggcattcctgtaccggcaattacgatggttcttgcctttgtcatcctttgggtgcttcttcataaaacaccattcggacgccgaacgtacgctatcggcggcaacgaaaaagccgcgctcatttcaggcatcaaagtgacgcgcgtgaaagtgatgatctattctttagccgggcttttatccgctcttgcaggtgccatattgacttcccgcctgcattcggcccagccgactgcgggagaatcgtacgaacttgatgctatcgcggcagtcgtcttaggagggacaagtctttccggcggccgaggacgcattgtcggcacgttaatcggggtgctgatcatcggcacacttaataacggacttaatctgcttggcgtctcatcattttatcagctggttgtcaaagggattgttatcttaattgcggtattgttagaccgcaagaagtcagcttaggagggttttacatgaaaaaggctgtatccgtcattttaacgttatcattatttttgttaaccgcctgttcgcttgagcctccccaatgggcaaagccatcaaactcggggaacaaaaaggaattcaccattggcttgtccgtctcaacgcttaataatcctttttttgtctcattaaaaaagggtatcgaaaaagaagctaaaaaacggggaatgaaagtcatcattgttgatgcacaaaatgattcatcgaaacagacgagtgacgtggaagatttaattcagcaaggtgttgatgcattattaatcaacccgactgattcttcggcgatctcaacggcagtagaatctgcaaacgcagtcggtgtgcccgtcgtaacaatcgatcgatctgcggaacaaggaaaagttgaaaccctcgttgcttccgataatgtaaaaggcggtgaaatggccgcggcgtttattgccgacaaacttggaaaaggagcaaaggtggcagagcttgaaggcgtccccggcgcatctgccacacgggaacgcggctcaggattccataacatcgcagaccaaaagctccaagttgtcacaaaacaatcagctgactttgaccgcacgaaaggcctgactgtcatggaaaacctgctgcagggacatcctgatatccaagctgtttttgctcacaacgatgaaatggcgctcggtgctctcgaggcaattaacagctcggggaaagacatattggtgatcggttttgacggcaataaagatgcgctcgcttccattaaagacagaaagctgtcagccaccgtcgctcagcagcctgaattaatcggtaaattggctacagaagcagcagatgatattttgcacgggaaaaaagtgcaaaaaacaatatccgcgcctctcaaactagaaacacaaaaataattgtctgatgtttaggaacctgcgataacgtgaatagagatatagaatgaattatttctcttacgtgaggagaggaacggcatgaacaaaccaacaaaactattttcaacattagcacttgcggctggaatgactgcggcggctgctggcggcgctggcacgatccatgctcaacagccagaaacaacggtaagcattgatgatttatacagttatccgattgattcttatttggtatcagcagaggctctaaatgtcagaacgaagccttccgcatcaagccagaaagccgatacgctgcacttaggagatagcctaaagctgatttccttctcaaatgctgactgggcaaaggttaagtataaaaatggaaaaacaggatttgtatccactcattacattgttaaagcagcgacaacggtaaaaaccaaaacaaaaacaaaagtgtatacatccgctgacggaaagagcattaagactcttccagcagacacaagcgtttcttttttaggctggagtaaaacgaataaaggcggttttgattttgattgggtattcgttgattacggcggtacgacaggttatatgaaaacaaaggatttacacatgacaaaataactgagagggattccgcataaatgcggaatcccttttattatgaattgatttgtcacattcccaagatatttctcaggaaatattgtcgtatgctgtgtcgaaaccttacatgatcatcgacatttttgttcacgctaaaaagcggaggtgtaaatatggatcaatttgaagcagcatatgaatcgtataaagcccggcaaacaactgccgatcaagaaaatgttccatctggaaaagaagaaattattgcggttagaagaaatgaggaagacaatattatcgcagtgaaaaccaatacaggaagagagctcgactaccctactgcgctgtcagaagcaaaatcaggaaaactcgctcatgttgatgtcttccataaatacgggcgtgacattttgcgaagtgaaccggacggcatcaaggaaaataacctgtctgagctgccggatttttaaacaaatacagccctgccgtatgttggacagggctgtattttaaacaaaaggctgctggatgtattcggctaaccgttttgcactgtgagaaatatcctctgcagctgcataattcacgccatagaacacatatggaggcagatacttcatgccgatcagattactcgtggcctgaaatggtttcaatagctcactgatcgagtaatgatttgctccgcccgcttgatatttttccgcttcgctccctgttgatacagccagcatcagctccttgccatgcaaggcatttccttctgaaccaaaagcccagccataagtcagcacaagatcctgccattttttcaagagcggcggagagctgtaccaatatagcgggaattgaaagacaatccgatcgtattcctcgcacagctgctgttccttcgcaacatctatcgcttcatccgggtattccttataaagatcccgtactgtgatattgtcatgtttactcaattcctcagcccacgccttattaacaactgaggtctccatatgaggatgcactgccaaaaccaatattttcatcagaccacacctttactgttttgatgttattttatctaaaatcaggaaaagagccaaataaaaagaaagccctgctaaaaggggctttctttttttcttttattcagggcttccttcagttgtttcgatatctttcgcaaaatcagggttatccagattcgcattaaagaaatccgctgtgttcggaagtctgagattcatgttcattttttgagaaatcgtaaccgtgcaatcctcaagcacatagtcaaaaacgtgtccgcctgaattgcgtccttcgtcaatgaagtgcaggtgatagccagaaacggcgattccgtttgcataagctggtgtcaagaaacctacaatcgttcctctcacgttgtcgaagttgaaaatcggctgtgttttgaccgcttcaaccattggcacgtaaggtttttcttgaagttctactgttcttgtctgcacctttttaaacaatccgtcaatgcgaattgcataaaataagtttctgcttggcagcatgctgttgatctctttttcaaagtcttcgcgtgtcattttcgcatcaattttgtgcgtcatgtccggtgtaaagaacgtaaatgaacagaacggtgaacggtctccattttggaccggtgtcgcggttccgtctgagcgaagacggtaaaattcgccgtcaaacccaatcagctctccgtcaagcttgttaaaggttccgataccgaagtctccatatttcggaatctctgacagttcaaaatctccgtcatatactccgtctaatagagaagtcattgttgatacttgataaatctggctcacaggctgatctttttgaccacggctgagcacttgaatgttgctttctcgtttcatatttcccttcactccttttatttagtgctgttcataaaacagtgtcgtgatgcgcagagtgctagagagctttcgttttcatgagttccccgaattctttcggaagcttgtcacttgctaaattaatgttatcactgtagtcaaccgggacatcgatgatgacaggaccttcagcgttcatgccttgacgcagaacatctgccagctggtctggtgattctacgcgcaagccagttgctccgaagctttccgcatatttcacgatatcgatatttccgaaatcgaccgcagatgtacggttatattttttcaattgctggaatgcaaccatgtcatatgtgctgtcgttccatacaatgtgtacaattggtgcttttagtcgaactgctgtctctaattccattgctgagaataagaaaccgccgtcaccagagacagaaaccactttttctcccggtttcaccaatgaagcgccgattgcccaaggaagcgcaacgccgagtgtttgcataccgttactgatcattaatgttaacggctcgtagctgcggaaataacgtgacatccaaatggcgtgcgaaccgatatcgcaagttactgtaacatgatcatcgactgcattacgcaactctttaacgatttcaagagggtgcgctctgtctgatttccaatctgcaggcacctgctcaccttcatgcatatattgttttaaatcagaaaggattttctgctcacgctctgcaaattccactttcacagcatcgtgttcgatatgattgatcgtggacggaatgtcaccgatcaattcaagatcaggctggtaagcatgatcaatgtcagcgataatctcgtctaaatggataattgtccggtctccattgatattccagaatttcggatcatattcaatcgggtcatagccgatcgtcagaacaacatctgcctgctctagcagtaaatcgccaggctggttgcggaacaaaccgatacggccaaaatattgatcctctaaatctctagaaagggtaccggcagcttgatatgtttcaacaaatggaagctgaacctttttcaaaagcttgcgaaccgctttaattgcttccggtcttccgcctttcatgccgaccaaaacgacaggaagttttgctgtttggatttttgctatggccgcactgattgcatcatctgctgcaggaccgagttttggcgctgcaacagcacgcacgtttttcgtatttgtgacttcattcacaacatcttgcggaaagctcacaaaagcggccccagcctgccctgctgacgctatcctaaatgcatttgtaacagcttccggtatattttttacatcttgaacttctacactgtattttgtaatcggctggaatagcgccgcattatccaaagattgatgtgtccgttttaaacgatctgcacggatcacgtttccagcaagcgcaacgacagggtctccttcagtgttcgctgtcagcaggcctgttgccaagttagaggcacccggtcctgatgtgactaacacgactcccggttttccagttaaacggccgactgcttgggccatgaatgctgcgttttgttcgtgccgggcaacgataatttcaggtcctttatcttgtaaagcgtcaaataccgcatcaatttttgcacctggaatgccaaatacatgtgtgacaccttgctccactaagcaatcaacaacaagctccgcccctctgtttttcacaagggatttttgttcttttgttgcttttgtcaacaccctcactccttattatgcattttaaacgtaaaattttaaatatcttgtgataagtttcactatacactctttggaaattgacctccaatatcgattcgccttatgattaatatgtaatacgaattattaacctatggaaaggaatgcatattgaatggagcttcgccatcttcaatactttatcgcagtagccgaagagcttcatttcggaaaggctgcccggcggctgaacatgacgcagcctcctctcagccagcagatcaaacagctggaggaagaagtcggagttacgcttctgaaaaggacaaaacgatttgtcgagcttaccgcagcaggagaaatctttttaaatcattgccgcatggcattgatgcaaatcggacaaggaattgaactggcacagcggacggcccgcggcgagcaaggccttctcgtaatcggttttgtcggatcagctacatatgaatttctgccgccgattgtccgggaatatcgtaaaaaattcccatctgtgaaaatagaactgcgtgaaatatcctcgtctaggcagcaggaggagctactaaagggcaacattgatattggtatacttcatcctcccttacagcatacagctttacatatcgaaaccgcccaaagcagcccttgtgttttagctttgcctaagcaacacccattgacttctaaggaatcaattacgattgaggatttaagagatgaaccaattattactgttgctaaagaagcatggcctactctatacatggattttattcagttctgtgaacaagcgggcttcagacccaacattgtccaggaagccacagaatatcaaatggtgattggtttagtcagtgccggaattggtatgacatttgttccttcctcggccaaaaaattatttaatttggatgttacttatcgaaaaatggaccaaatacagcttaatgcagaatgggttatcgcttaccgcaaagacaatcataatccgcttataaagcattttattcatatttcaaattgtcagcagacaagaactaaagagagtgatgcaggtacatgaacaatacttgcaatctcttttttcttttgggattcttatggaatttttattaatttaatataatcgcttagtacaactttatatcagtatacgtatacatacagtacaaatagttggcaaggacatcagtaagcgcaggacattagtttgattttaaaaatgaaagatagagaggtgaagtaaattattgagttcaccggcatattcacattgctcgcttttttcgtaacaatgatttttattttctggagaccaaaaggactaaatgaagctatccccgccacatttggcgctttaatggttttattgtgcggaagtgtgtcattggcagacttaggggaaatcggaacaaaagtcacgggtgcatcggttacaatccttgccactatgattatggccattgcactagaaagctttggtttcttttattgggtggctgcaaaactgctccaacaatccaagggttcaggcatcaagcttttttggctaaccaatttgctctgctttctcatgaccattttccttaataatgatgggagcattttgatcacaactccaatccttttgcttgtactaaaatatttaggtttaaaaaaacatcaaaaagccccatatttattaagcggtgttttaatagccacagcctctagcgcaccgattggcgtaagtaatattgttaatttaatttctctcaaaatcattggaatggatctatatcttcacaccgccatgatgtttgtccctagtatgatgggactcatttttatgacttgtctactgtttatgttcttttataaacgtcttcccaaaagcctgccagatataccgggccattttcagtctctgcggcatagaaggtaccatcctcttcattcgccatcagctcctttaccagaacgaaatcaaacaaaaatcatgttgtttgtgcttgcatttgtttttctcgtcagaatgagtctatttgcagcatcatataccggtatttctgttcctctagtcgctgtcatcggatcttttatcctgttgagctggagatggatttatttcaaaacctccccaagagacttgttatataaatcgccttggcacatttttatattcgcttttactatgtatgtcttaatttatggtctgcataatattggattcacagagttacttgtgagttattttgaacctgtggtttctggaagcctcgcccatgcaactttcgcatcaggtatctctacttcagttttttctaatctctttaacaaccatccagcgttaatgatcagtacttttaccttaactgaaatgaccctgaatccttcaacaacaaaaatcatctacttggcaaatattatcggcagtgatatcggttcattattattacctatgggaaccttagcaacgcttatttggatgcatatattaaaacagcatgatgaaagtatttcatggggcgaatatataaaaacgaccattatcatcattccgctgactgttctttttacgttaacatgtttatatttttggatcagttggttatttctttagcacagtatgaaacgaaaaactgccttctgcttttcaagagggcagttttgtatacactagggaagatgcattgtctttagatgatttaacttccaaatgactggctctccacttgcgttaataagctcaatgatattattagagacaccctttaatagtccgactttttctggcacctctcccatatcaaatatgaccaattcaccaatattttttttgatctgctcctcaaaattacgcacaagaggaactttggaaggcacgaccggcaattgtgagttgtcaagagtatacggtgtttgttcagttgaataaggggtaaaccattttaaatgatgcatagatataaaaagtattttaaatacgggtgagaaaaatacaatataatcgtttaaaacatttgtaacatatccatggatcgatcgacccccagttacataaacttcaataaactggcctttgaccttgtttaatgtatttctatatgaaaaagcttgagtttctgcctctatcattggatcttccggattgatcaaaaatggcttctcagtactggtcactattttcgccttgtttatttgatgaagatgcaacaagggaatataaagataattgcagccatcaaaaataacaaaaatatcctgtccgatatctatgagggtgccgacaaaccttgtatctcctgaaatgacaacctcaacatctgtgttaaggaattgattcaaacctttcacgattctcctcctttaactgaaaaagggcatcactttatctgatgctcctccattatctattaaaatttacgtttccagtgatagtctatcgttctgacaatcgtttcatagctataatcttccttttgttttcctgaactttttattgaacttgaatagcctggtgatcttgatgattgataatctgaagatcttggtgatcgtttagatgattttgatgattgataatctgaagattttaatgatcgtttagatgattttgaagaactttttgaacgtgacgaacggccagatttggatgattgataatccgaagattttagtgatcgtttagatgattttgaagaactttttgaacgtgacgaacgaccagatttggatgattgatcatctgaagattttagtgatcgtttagatgattttgatgagctatatgattttgaagaaatgaacgaattgctgtccttatcattattgtcttcctggttttgttcatttttttgatcctcttttttgtacgacccttttggacctaagctgatgctttttatgtgaaaaggatagatgcgaagcacctcttgatttttcactatagtataatggccgtcggcattatctacaaggataccctcaatggcttccggacctccacgattaattgaaacccatttatgagtcagactcttaaaaacctcgcttaaatcatcagcttccaaaactccaactggcgtctgctcttctattttcaaatcaggctcgtgtttacttatacttttgatgtgatggatattaaaatacactaccccatcctcatttgtgtttaacgcagcgtaatcatctcccagccagaccaatcttccttttttagattccggacccccttggttaaattgaactgattggtttattaaatgtccgattaagctatgaaaatcatcagcatcgagcatttcctcagtctcaattgttgtggtgctattattggtatcctcagtaatacttttcacatgctccaactgataataaattatttttttttcagcttgtaaagctatataatctgattttacagctgttaattttccttttttagattccggacctccacgatatacagtaacaattttatctttcattgagtgcaaaaagttataatacgatatttcattatttgaatgatatttcattctcctcttgctcattcaaattcctcctagtcacttatacatagatgataaacatactgcatatatacgtgtcacatttatttgttgaactaattcaatagcctaattgtcgctttttccgcgaatacccattttcacgcattcataaaatacttaaatgatctttgaggtattgtgaacggtttttaatatactcgcagatcacatccggctcacggtcaaaacgctcaatatcattctttttatacgggtccatgaggacaaacggcctaatccgttcatacatcgccatgattttcggttccatatattctattgtaaaaagagattggagcgttttttctaacaggcgcttgtaggacttgcgaaactcggattcatccaatatccgggcggttagtgtattaaatccttgaattcttacataatcggcagccatccgctctccatggatatccctgccccaagtcgcatcataatcccaaggaatcacctcaaataatccggtttccccgcttctgtataatgcgtagttgtggacaaacccgtcatagttcgaggtgaatacaataccagcaagccagcgcaaatacttatcgacatccacgtgttttgtcacttctgacttaaactgagctttagggaccgtattaattttaaaaatcatatcttgtaaataaaaatcatcttcctcagtccctgttttcttttcatatccaagctccagcgatgttttcgtttccctttctaaatcgctcatcagagaaaagttggcatcatcatccaccgcataaaaaatcgcgccatcagccagcttccttttcgccaaataatattcatctacggattcaagttcaagataaaccccttcattcttcccattcatctttacaaacgcaaactctgcctttggagacagtgtccctagctccgagaaaaaatccagagacaatttgtttctcatcaaggaagggtctttatactccgcatttaagtgaatctctcgcgcgccgcggaatgttttcggctgataaaaggaaatatggtatgacttctttttgaagtctctgatatgtgatccccgataagcgatatcaatatccagccttttttgatttaccttcatcacagctggcaccggatcatcgtcccatatatccttttttaattcacgcaagtcttttggatgaacaaacagctgataaagcggtaaattggattgattcttcatccataatcctccttacaaattttaggcttttatttttataagatctcagcggaacacttatacactttttaaaaccgcgcgtactatgagggtagtaaggatcttcatccttaacatatttttaaaaggaggatttcaaattgggccactattcccattctgacatcgaagaagcggtgaaatccgcaaaaaaagaaggtttaaaggattatttataccaagagcctcatggaaaaaaacgcagtcataaaaagtcgcaccgcactcacaaaaaatctcgcagccataaaaaatcatactgctctcacaaaaaatctcgcagtcacaaaaaatcattctgttctcacaaaaaatctcgcagccacaaaaaatcatactgctctcacaagaaatctcgcagccacaaaaaatcgtaccgttctcacaaaaaatctcgcagctataaaaaatcttaccgttcttacaaaaaatctcgtagctataaaaaatcttgccgttcttacaaaaaatctcgcagctacaaaaagtcttactgttctcacaagaaaaaatctcgcagctataagaagtcatgccgcacacacaaaaaatcttatcgttcccataagaaatactacaaaaaaccgcaccaccactgcgacgactacaaaagacacgatgattatgacagcaaaaaagaatactggaaagacggcaattgctgggtagtcaaaaagaaatacaaataatctaagttttcattgtttcaataggctgccggcggaggtacggaagcctatttttttatttgccctgtattagatatatgtcatgacataacatatgcaacccgcatcatttggtttcctttaaaccatttcgttataatcaaggtatcctaacgataaaggcggttgttgctatgtacatatttcaagctgatcagcttagtgccaaagacacatacaagctattgtcaggtaccgttattccccgccccattgcatttgtgacaacactttcttcaggaggagcggtaaatgccgcgcctttcagtttttataacgtcgtcagctcagatcctccgcttctcagtatttctgttaacaggacggaaggacgccaaaaagatacagcacgaaacgcagtggagaacggagaatttgtcgttcatgtcagtgatgaagccatcattgaagatatcaatgaaacagctgcaagcttaaggccggatgaaagcgagcttacacgcacctcgcttcatcctgttgaaagcaaagctgtttcagttcccggcattaaggaagcccgcgttcgctttgagtgcaaattagagcggcatattacctttgacaatgatcaaggcatcactacagcagatctgctcatcggaagagttgtctgcttccacctagatgaaaaggtgtatgatgcagaaaagggatatattttaacggatgaattaaagcctgcctcacgattggcgggaaatcactatgccaagctgggggaagaattcacactgattcgtcccagctgaagagaaggactatttaaatagaagaaactagtcaaaaagaccttatgattacaaaatatcgcctgtaaataactgaaaaaatatcaaaaaaaagaacacccagagcaagctcggggtgttcttttatgaaacgtttttcctttttcttcgtataaaggtagattaggaggaattggaatgacaaacttttggattttaatgctgatcgctattaccatcagtctcgcctctcaattttttataaagaaaaaatacggtattgataaatccggctggcgatataagcatgtcagcaatacacacaaatggatcgaaatcactttacttattttgtttgtgttttcactctccttttttccagttgaatatttgcttcttttattttttattgtgattgactcaatacgtatttttatggagtggcattatagacctgaagataaacagtatatgtaccacattgtagaggtctcccttatgtttatgcttttgatttatgtttgtaccctatagttatttaaatccccacagccgctccgtctccccgaggatcggctccgccttggagaaagccttcttcatcaactttgattgcagccgcttgtcccatcagcggatcatagtcaccgacaacctccacgagatgcccgctgtctttcagtttttggattgttttgtctgtgaatctgccctcgactctgagaccttcgtattcctctccccacgttctgccccatacccagcgcggttcgctgattgcctgctgtggatgcattccgtagtccagcattcgggtaatgatggccgtctgggtctgcggctggccttcgccgccttgtgtgccgtacagaatttttggctttccgcctttacagaccatagccggcatcaacgtatggaaggtgcgctttctcggttcaagcgtgttgacatgattttcatccagtgagaaaaacgatccgcggttttgcagtaatatgcctgtatcaccggcagtgactgccgagccaaattcaaagtacaggctttgaatgaatgacactgcgttgccatccgcatcgattacggccgcatatgccgtatcacttcccaccggcctgctttctgccggtattgcgagatagccgatttcttctgccaattgttttgcataacgtttgtccaaaagcctttcaagcggaatgtctgcaaacgccggatcagtcaggacggcatcccgatctagaaaactctttttcaatgcctccacaagcacgtgataatactcaaatgaaccgtgttcgatttgggtgaaatcatagttttccaaaatgttcagtgttaataaaccggtaaatccctgagaattcggcggcgcctgatacacactgtatcctcgataatcacttgatacaggcgctgcccactcaccccgatgcgctttaaaatcatcgattgtcatgtaactgccgttattctgtaaatgtgagacaatccgctgagcgagatctccttcataaaatgcgcttcttcctttttcagcaatcaagttcagactgtctgcaagctctttttgcacaaaccgctctcccgggacaggtgctttgccccttctcgtgaagatgtcagccgtgtaaggcgtggaagccagcagttcaatattcttttctgtgtgacgacactgatcagctgatacaggaaacccattttgggcataatcgcgtgcgggctccaatacatctgcaagagacagacgcccgtactccttcaggaccgcatcccagctatcaaccattcccggcacggtaatagcactgtcaattccccgcagcggaatcgcgctttttcccttatatacatctctcgttacgttttttcctgaacggccgctgccattgtagacttttactgcctttgtttcctggtgaaaggtcagccaaaaggaatccccgccaagtccggtcatatgcgggtacacaaccgcaagacaagcactcaccgcaacagcggcgtcaaacgcgttgcctcccttatccagtatgcggtttccggcttgagaagcgagataatgcggactgacgaccatttgctttgtaccgatgacagatttgttcatcacaagtccccttttttaagaaattttcttcagtatagggagcctgatttttcacatctactgatccggcagaaaaactgacgaactttcttcttttcgcaaataataagatattttcgcattcatttcgaaaacaaatgaaaaattattatttctatacgtaacttttatgataaaatgattgctaaaaggctacgaaagcaggtggagcaattgagtcatgaatatcaaatccccaaccttgtacttgatgagactgataaacaaattctcacgattttgcatgaagaaggcagaatttcttatacggatcttggcaaaagagtcgatttgtcacgggtcgccgttcaggcccgtatcaaccaattaattgaagccggtgttattgaaaaattcaccgctgtcatcaatcccgctaaaatcggcatccatgtttccgtgtttttcaatgtcgaggtagaaccgcaatttttagaagaggtcgctcttaagcttgaggaagagcctgcggtcaccagcctttatcacatgacaggcccgagcaagctgcatatgcatgggatctttaccaacgatcaagaaatggaagaattcttaacaaaacggctgtatccattgcgaggcgtcgtcagtgttgattgccagatgctgatcaaacgatacaaaagccgtatgggaatgaagctgtaaaggagagaaacaaatgaaaaaccatccttatcgggatatgacggccgcaatggttcgcaccggcatattagggttcggcggcggaccttccgtgattccgctgatccgccatgaagcggtcaataaatataaatggattgacgatgatgaattcggagaaatattagcaatcgctaatgcgcttcccggaccgattgccaccaaaatggctgcttatctgggctttaagctaaaaggcacattaggtgcaattgtggcgatcctcgcccacattctgcctacatgtcttgcgatggtgggcttgtttgcggctgtaaatgtgttaagccattcagcaattgttgcaggtatgattggtgccgtcacgccggtaattgcggtcatgctcggaatcatggcgtacgagtttggccaaaaagcgcttaaaggtttcggctgggttaccggcatcctgttttttatcatcgcttttatcggcctgcaaactttacagattaatcccggcctggtcattatcattttcttagcttacggggcgtttcattttaaactgaaagacaaaatcacaaataaacattcaaaagataaaggaatgtcagcctcatgatatcgatctatttatttatggcgttttttatcgcaaacctactgggatatggcggcggacctgcgtctatcccgctaatgtttgaagaagtcgtaaacagatacagctggctctcaaacgatcaattctcaaatatgctcgcacttgcgaacgcattgccgggcccgatcgccacgaaaatcgctgcgtatgtcggctacagcgcaggcgggtggcccggcttcctaattgccctgatcgcaaccgtcgtaccgtcggcgctcgcattgatcgtcctgctgcgcatcatccagcgcttccgccaatcacctgtcatcaaaggcatgacgctgtccgtccagcctgtcatcgcggtcatgatgctcattcttacctggcaaatcggcgcagacggcatcaaagcgatcggctgggtccaatcgatcgtgattacgggaatttcgctccttgccatgacaaaattcaaaatgcatccggcatttttgattattgcggcgtttttatatgggggccttgtgatcccttatttatagaaaaaagcacctggacaggtgcttttttattttagcccagaaatgccgtttgatatgacagctgtttcttctcctgcgtcactcttgatcatgtgcttgacttgcagcgtggttcctgccattctcacagattgcttcaactgggacgaattggtttcaacttgtatccaaacaggaggctggaccttccaaaataaatagagtgcaagaatcagcaagccagcaatgaccgacagcaaaaacttcatatcgcatcgcttcttttcagtaagcggctcgcagcggacagcgcctgatgatcacgaagaatatcgcctggacgattgccttctcccagcacatagcctttaaaggacattcccataaaatgaaaaatatgttcgaattgctgaatcagcggcagcccttttatttttggattgtctccgcccactgctattacatatgcctgtttcactgacatttgctgtttaaaatcaggaaatctcggatctctcaacgtctgtgaccagcgatcaataaacagctttaatgtccctgacatgccaaaccaataaattggggtggcgaatataagaatatggcactgcaatatccgttcaatgatagaatcgtagtcatcttgaacaggacgaaagccgccttgggcgtgacgcagatcttcaattggttgaattggatatttctgcaaataaatgtgctccgcatcgaatccttgaacagccttctccgcaagaacatccgtatttccgccagaccgagttccgccgttaataaccgcaattttcatgatgcatctgctcctttgtttacgaatgattttcttcatcatataatggattcatcaatcaatacagatgattatttcgattaatccaatcgctaaaaccgatttagaaaggaagagaacaagtggaattgaagcagctgatcacctttattacggcggctgaacatgtaaacttcaccctaaccgccaaaatgcttaattatgcacaatcaagcgttacctctcagatcaaatcacttgaagaagaaatcggaacgcctttatttgaacggctcggcaagcggcttatcttgacagaagcaggaaaaacgttcaaatcttatgcacagaagatcattgcgttaacagaagaagcgaaaatggccacaaatcaagtaagagaaacaaccggaaccttaaaaatcggggcgacggaaagccagtgcacataccgcctgccccctatcataaaagaatttaaacaggcttttccccaagtaaagctcatattcaaaccatatatctccaatgaacaagcgaaagaacagctcttacagggccagcttgatatcaccttcatcttggatgtaaaccggatggaagacgcactgcacgttgaatctttgattcaggatgagatcaaaatggtggctgctaatgaccatccttttcctgcggatttaccagtaacattgaaggatcttcaaaacgaaactcttctgctgacagaggacggctgctcgtaccgcacgctctttgagaacaatttgcatgactccggtatctatcctaacaaattggaattcgtcagcatagaagccatcaaacaatgcgtgatggccggacttgggattggaatcttgcctgaaatgacagtaaaagatgatattgcagcaggccggatgaaagaactcaattggcagagcgattgccccgttttcactcaattagcatggcataaggacaagtggatgtctgcgccattaaaggcttttatcgatttgacacggaaaacattcaaataaaacctctccacaaggacgacaaggtttttgagaccagggcacacacatacaaaaaaaacacttgatgacttagagccccaagtgttacacgtgatttttctgataaaacgttcgcaaaacatgcgtctcaaggtcagccaggcggacagggatcggcagcctgctttcttgattgatcaagctcatcgtgatctgatagctgctgtctaaatcaatataattaccgcaagacaagaaaataggcttcacgtcccgccgcgttcgcagcgcccgtccatatacctcgccgtcaatgataatatcggtgtatgcgcctacttcaatttcaggcgtcacgaaatcgcagcctttgattttgagataggttttcgctatcccaatcgtcggcttgcccagaaaaaaagccgcatgggtggcaacgcccatatgattgtaatgcagatatccgttgccatcaaacaagaagacatccggctccgtctccagctttttcgccgcctcgatgatcaagggcagctcgcgaaacgcaagaaaaccggaaacatacggcacgctgattctccccatgctgtgcactttttcaatgacttcttttgtatcagcgtcaattacgataatacagcacactccgtatggttctccatcctgctcccaataggccaggtcgacgcctgcgcaggtgttgatggagtctggatggatcgtgggggataggttgatacgatttttaaggttaaattgcacttgtaaaaagtcttgttcctttttcatatcaaatttatgcacatcaaataccttcataacgattgctcactctcgacctaaattaatgtgagtctctcttctcgattctagtatttcaaaatgaggactatctgtatctatctcgtacttatttaatagattgccttcttcatcccaattcttttcagaaattagtatggaatgctcatactgttgctcactttttttcctgccattttcaaaccaaattatgcttataccgtgcaattgcccatatcggtattctttttcactttttttattcccgttttcataaaattcacatgttaaaccatgggccagaccattcttatatttagtaaaatagatgatttgaccatttggatataattcgtaagccagccctgtaaacggctggccattttcgtcttcaggattatctaaaatctcatcacttaccgaagagaaccataaatcctcaaagtccactcccttttcttttatactcttcatatcatattcattttccatactttaaagcctccggtatataatttgtattttgagttatatattcacaatgtggacatctaggcattgggacaccttctggcatctttttatttattttcctagcacttactacatataccattaaatcttttaaatccgcatcaggtctttgaagtaacgcttcatttagagcattaacttcggcatgagaacccgcccctgacgtctttatataaccttctttaagttctgtaggcatatttacaattctatcatgaataagtggatgtagtaccttaggtggcttcccatctatattgtttattccaaaataataattgcctgtttttttgtccaatacaccagctaccgcagggcctctttgttttttagttagaccagaagatttaattctactaagttcgtttagtacttctgcccttagatttattcgatggtgaagatcttctttagacaatacaccatgcttatttcttaaatattgaagcctagtttgtttttcttcagtagtcttagcaatattgctaataaggctttcattactcactttattgacatatggagcatttttttggtacaaccgatcaaagtagtgtgccaatcctgctccaccaataatagtaatagcttccagcgccccttgcttccgcttctcctcagacactttgtttccgaacatatcccggcctgtgacagcttctgagaatccgtttgacgcaacaaggccgtatgcgcccatttctgtcattttgagaatgtctaaggatttgcctgttttgtaggcgtctaatgcgtgttcagcagcgatagctgcttttccggttttgtagatggcttttccgcctttgaaggcccggcctgcccagccgacgactggtatgaatccggcagcggccatagctcctgctgtcacacgctccgcggtggagagtttttctccggtaaccggatcaacgccttcggttgctcttttataatcataatagccagtgacttctccagtaaagttgcaaactccatcccatgttttttcgtaccacggtttgtttgcttcttcctcggctttttcctggagccgtcttgcttctgcttgctgggtttttgcatcgatataggttgttccttgattttctacttcaatgacgcttttgtagacttcattgctgtggaaggcttttttgtcatagtacataggggatgcgctcttcccattgctggtggcctgcatgagaacagaatatttggtgagcactgcgttgtccagagattctaaattttgatattcagtggtcagggattcatcaagcttatcgacagctgtgattgtatcacgtctgattttttgggcatcgcccatcttatctgcatagtcgtcaagcgtgtacatgtcgagatcaataatatcgctgatgcctgacaaaatagaatcgatttcttctttatgagcggagacaatctctgaggctttcaggtctccattgggcagctcatgatccaaaaaagaagtttccacatatgaatcattcagttcttgatctttaatatctcctgaaatgccgtttaaaaacgcaatttgagcagagacaagcgtcagccagctgtctacgatttctgcctgtccctgaaaaaaatctttaatattgtccgcgccatttcctttaaaattatcgcctaaatcggcaactccctgaaacgcttttttcagcgtattcagctgctcttcaagcgtctcatattgcttttttctgctcttcgcttcttcgattaaagattttgattcaaatactttactcatcgcactgccctttctgttctattttaccgctatcgcctcgtcctgctctttgagtgaatctacgttatcctttgtatcctcgatatttttctgtaccgcttttttgtaatctccgagcatggttttgatgttctcctcacgctcatggtattttttcgtataatcgaggctgttttttccgttggatcctgcggcgccgattgatacgtcagcaagcgcatctttgacagaatctaatgttttgatgactgtgtcgtacttcagcttaatttctgacataaaaaaagatcaccaccattttagtttactaattgtatttccgacttcttccgcgaactcttctccctttttaagaagatctgctgcaccatttgctatgaacaattccgatgcatatttagctttatcccattcaagatcaaaaattttcccgttaatcgaagccatatactcgttatatttatcattcacaatcttagatgcttccgatttcgcctcttctcttcccttgtcgaaatcatcggcttttgttcccgtccaatgcttgcccaattccggtttcacaatttctttgatttcagtgattgcctcttcttgcagtgtgtctatgtccttttttgcttttttcagcttttcgatcttgtcttccacgtctgaaatttttccgttgagcgaacttttgatatccgctagcatactttcataacccatctgaatcacctcttaatactcaaaaagtcgtatggaggggctgatgaagatagacttttccatactttatttccatatattatattttaaaatagccagaaggcggcttaaatagggtaaatggcttaatttaggcatataacgctcttgaaatgtaggtatttgatcttgtttttgttcgttatacagctaataaaagcgttttataaaatgaaatcacctaatgtcatagttataaaggcacttgaaagaggcagatgttgttgatctgcctctttcggcgctgagcttattgttcatgtttatgttcttcatctggtcggccatgtctgattttgtcatttggcttctattattccccccttctgaccctttggatcaaaagcttgtattagctgcagtcccagttgtacagaacgtttgaaaagtcttttttccttagatcttcaggtgtgatgaaaaaattggcgatgccgacgtctccccacattgaatcgatatcatcgtctgaatcaatttgtaacagcatgatggtgtgttctttatatgcgtattcccggggatcatgctgggtaaaagaagcgtatccgccaattttatggccaaatccgttttcagccagttcattataaatgtcttcttcatcctcgccgaactgaccaaagaactccattgtttccatgcccgtatactgctcaaattgaaaatctgtaggcagcacccattccgaagatttcacaggctcgactgccgcttctgataaaatcggaaaatcacattcgcctgtgccaataaatgaaaaatcagaaacaagctcgtcatcgttttctacgatattttcaaaatagatcactctgaaattcttttgttcacatcgatcgtcaaaattcaatccatagacgtcatcatgaacagaaatgtagaactgcaggatacctgaagaagggtagccgtcaagctggggaatgtgcgagaaattaatctgcgccagaagtttcatcggctgtccattttcgtcagtcggatatgtttcatgcttggggaaatagggatcaccggcaattttgctgtcatatcgtcctgttttcccctttctcacattcagtttcacgtattctttcgctgatttctccagcaagtcgcggtacggtctcattttttcgggcagatgattcatcagattctctccttttccggcatctccaaggttttattttctggttttcttctaatgtttttcaaacgaatgtttaaagaagccctacttctgcataattttccaaacaatagttaaatagtagcaaatgtattcagcaccccgcaatagatgaaaaaaagactggtgcgcaaccagcctttctttttcatctattgaattgcacctgacggaacaaccgccttccgtccgacagaataatactccactcctgcagccaaagcctcatccaatgtgtagcagtttctgccgtcaaatatgagcggcgtttccatcaaatcctgataagccgctaacgggaattgtttaatgtcagcccagtcggttaaaatcatgacggcgtcagaccctttgacagcttcctcgatcgtctctttatattcaacagcttgcgggagaacatgctttgcatggctaactgcaatgggatcgtaggctctgatacgggcgtcgagcgcagcgagacggtctgcaataacaattgacggcgcttctctcatatcgtcggtattcggtttaaatgacaggcctaaaagggcaatcgtttttcccgtcaccccaccgagcctgttcagcgctttatcaaccagcatcgcctgctgattgttgttgactttgataacggatttcagcagttcaaaatcatgctcgacattgccggcaatttgcacgagggcgtttgtgtcctttggaaaacaagagccgccgtagcctatgcccgcttttaaaaactggctcccgatccgcttatcctgtcccatcccgtatgcgactgcttcaatatcggcgccgaccttttcacatatattcgaaatttcgtttataaaactgatcttagtggccagaaaagcatttgaggcatatttgatcatctcggcgcttctgatatccgtttggtaaatcgggatttgaaacggacggaagagctcctccagcgtatttgctgttttctcatcggccgtcccgatcacgatcctgtcaccatgaaaggtatcatagatcgccgacccctcacgcaaaaattccggattggatgcgaccgaaatactgacaggctccgctagatgttcagtaatcagtccattaatcaaatcgtttgtcccaacgggcactgtgcttttcgttaccacgactgtatctcgtttgacatgctttgcgatgcgtttggccgcatctgtaatttgctccagattggcgtgcccgtcgcttttctgcggtgtgccgaccgctataaaaatgatgtctgcctgtgccaagcctttctcatagctcgtttcaaagttcagccgtccatcagctgtattttttctcatcagctcttcaagacctggttcaaatatgggggaaatgccctttctcatttcatcaatcttgtgagcgtcaatatcaatgcaggttacatgatgtccaatctcagaaagagaaacacctgtcacaagaccgacatagcctgttccgatgactgttatattcattgtttccctccaacagttaaattgctgctttgcagcttccgtaatatcgtatgagaacatcctatcatgaatgcgaatgatctcccgcatagcctgtcgggtacagcctgtacagatttctgaaatgtgattcaaccatacaatacactattatatcgctctcaaaaagaaagtggtgaaatgagaatcggctgttaaaaaaaaccaaacaattttcttcttttgaccggctgcggaggctgtctgaagatggtctgattccgcaggagaagctctgcattttccgtcagcatataaggaagttccgagccgaattctttctctagaacataaagagcctcttgagtgtgaaaatttctcgttttcacattatgggcatctgaggctacgaaatggatcaaattggcttcaaccagccggagagaaaatgctttcagctgcttgccgaagatccccgcaagacttcctgaagtaatctgagatgctgctcctttttccacaagatgatacagcaaggacgggttttcgcgaatttccctgttgcgttcaggatgggcgataaccggaatatatcctttcagctgcaaatcataaaaaagctgctccgcatatcggggaacgtgatcaaacggaaactcaatcaagatgtattttgtatcattcagcgaaagcagctgacgtttggcaaggtcttgttccacctcgccgtagattctgatttcctgtcccggaagcacatgtaaaggaatgtcttctttgattaaacgtttgtttaactgatctgctgcttctctgactgcggctggctcgtttttatacacaccgttgttatgatgaggtgtcgcaatgatcgtccggattccctgacgaacagctgctcttgccatttctatgctgtcggccgaatcacctgccccgtcatccattgcgggaagaatgtgacagtgaatatcgatcatgtcctagcccccttttttcgcaaaaataaataacgggcacgatgcacgttatttatttttgcatgaaattgtccttggttccgtaatatccgtattcagagtgcttcgaaagctttttgccgttcataatcgccccaaggagcttgcttttgcacgttgcaagcgcctctttcgcttttgcggcttgttctttttctgttttcccgcttgaaataaccagaacagaaccgtctgccacgttgcctaaaatctgtgcatctgctacggcaagaataggcggcgtatcaaaaatgaccatatcatatgccgcacacgcttcgtatgcaagctccttcatccacttcgaggagagaagctcggccgggtttggcgggatcgggccgctcgtcagcacgtcaagatgtttttcattcgatgcttgtacagcctgctccatagagcttttctttaataaaacagatgttaagccaaccgtattttcaagaaaaaaagccgtatgtactgttggttttcgcaaatcagcatcaatcaggagcactttttttccctgttgggcgaatacgacagccaggttggcggccgttgttgattttccttcccccggacaagccgatgtaatcatgactgatttcatttgccggtccactgaagcaaattctatattcgtgcgaatcgtccgatattgttcagagttcaaggatttcggctctgtcattgcaatgacatttctctgcatccgcgagcctctgttttttctaagcgccaaaatgtccactccccgttttttcagattggaaaccctgtaaggtctttgctgttttctgctcattcgcaatggtggaaactgtccctaaaacaggtatgtccagcaaggattcgagctgctcttccgatttgatcgtattatccaaatgctcaagcaggaaggccagtccgatgcttcccgccaatccggccgcaaacgcgatggcaatgtttagtagcggctttggcgatacaggggacgggtgttctgaaacctcggcttttgacagaatgctgacattgtcaacattcataatggatgtgattttgtcttgaaaaacagatgctatagtattggcaatatgagccgctgtttccgcgttttcatccctgactgatatgttgaccacttgggagtcctgttcgctggatacggtaattttgtcattcagttcttgggatgtcatcgacaggcccatttctttaatgacttcatctaagatggcagggctcttaatgatgacattgtacgtattgattaactgaagattggtttggacatcgttaaattggacttcttttcgttcatttttcgattggttgaccagaatctgagttgaattttcatagatgggtgtaagtgcgaagaaactaatgagtccgccggcagcagtggcagccgcggttacaatcataatcaaaagtatgcgttttgttaacgttgataatatctcttttaagcttgtagattctcccatgatacctccaaatctcttataacatccttttccatctacgattatacaacgttgaaaccgcatttctccagcttttcacgtgacataattcgacatttttttacaatgcgttatgttagtactttttatgtaagcgctatatttactgtgttgacagtgctgtctcattttctcttattcgggcagtcacgttctctcgcataaaaaaatcccgctaaaggcgtgcgggatttttatgttgcatatccatttttaatatgagaaatcaaattttcaagcatttccttcgtcgtcatctcagatgactgctcaccaatttcatgtgcatgcatcaaaattttcagaaattcttcttgattcaatttcttttcactcatcttttttttcctttcagcttccattaagttgaaaacacgattattatatgatgctggttatcaatttgcaatctctaatacatcattcgacacatcctattttttatgtccttttttaggaaaaactttttaaggccgatgtgttgcgatataatagagaaattggatctttttattacgtgactcggttaggagcgataatcatgcttcagaatatgatttccaaagacgatgtgctggcatctgctgaacagttaaaagaacttcttccttacaatgaggaaaatgttcagctgatcaaaaaagcccttattttatatcggcaggattcagtctatcgtttacaagcagtgagtccgacggaagttacggcttacgtgcaggatgttgtgcctgtgcgggtcacattgaacttgtttgtcatagtcaaaagcggctgttcatgtccgtccggaagaatctgccgccatatgctggctgtgtttttatatgtatatgcaatgttcgagcgagtgggtacttttacagagtattggctggagagggaaaagcttgaggaaagcaaagagctcgtccgccgccagtttcaggaaaaggtgctgcctaatgaagaatcactttcaagctggcttgctttttttgattcagagttttctctctggcaggcacgtacgccagaaggcagccaaaacatgcagggcctctattacggctacctgtccgcattaaaaaaacatgcgccgaacaagccggagctgaaaagcctgtatcagattcattccgcgattgcggtttggcttcgcatgttcacattgattgaagcgggcaagctaaaccccgaacaagatttttattccctcaatccgtacgttgaacagctgatggatacaatctacagctctattgataaattaaaaacgtacgcgctgtcttttgcgcttgatccgtttttggataaaacaccggatgttatccggcatttgctgttgaaagaagaaattttccaatatgaacgcatccgcgtcttcggtgaaatttggagtgcgctgctgtcgcggccaaaatgggtggcacgcgaacaggagatattgaaaaaagaagcaggacggcgtttttctcccgaattgcaattcgggcgcctgcatttggaattcctgcaaaaaaatgatgacgttatttttgaggaagcggatcaattcccgccggaagcgctcccttatacattccaatggctgagtgaaatgactgccaagaaggactggaaacggcttaaaacatggtaccagcaaattgaaccaattgcgatgggttatacgaagctggataagccgtttaaagagattcgcgatgtgatcggcgagctgttccttctgttgaatgcctatgtgcagcaaaccaatgatcaagcgctgtttgagcgctttgccgcgggctgtctgccgtatacgttcacagaatacagccatcatttatatgaaaaaaaacgctatgccgagtggattgaaattcatagccttgtcggcttttccatcaatgaaatggataaaatgatgctcaaggaaattgcagcgagcgaccctgaggcgcttataccggcttaccatagagaagtggcttttttcattgatcagaagaaccgtagctcgtacaaggaagccgcccggtatttgaaaaaattgcgcaccctgtacaaaaaagcgaaaaagcagaaggtgtgggagcggtatattcagctgctgagctcgcattacaagcgcctgcgtgcgcttcaagaagaactgcagaaaggaaagttgattgatggcgagtcttaaagaaattctcatccacgtcgaacaaatggaagatgggtcatttacgctctcagcctttgatgagaatgagcagcctcttccctacagccatatgaaaaagcatttgttccaatggcatgaatcctcattttacggaacctttctagaggatgtcagcttcatcgggacgactgctgtccttctatctccatggatgactgtagagcttctcggcaaaaactcgttcaactcattcagctccgtgcagcttacagaagaaacggagccgctgatcgaggcggcatcgaccatctatgaatttatcgcggacggcgattttatgcctgactatgacgcatggacaaacggtgtttttcgctggaaggaccgcgataatatactggaaggctttactgcggaatggttttccgctgccgtacaggattacatccagtacgacgatgacctgcgggagaaatgggaacatatcaaggaaaaatcgcctgcggttacgacattccgtggccattttcttgatgaagaggattttctggaaggcattggctggattgacgatcaatctccatttactgtcggcttgcgcttaaatgaaccggactttgacggagacgaatggaagatcgagatgtttttacgcgataaaaagagcggtgctgtagaattctttgacggactgaagagcctcaaaaaatcgtggcaggcgtacagcgataaaatcgcgcgtgagcaggaccgctttcacagaacggttccgtggctgtcgtttgattccgggacaacgctgatctcggaggaagaagcctggatcttcctgtcagaagcaagtgagacgcttgtcgatatgggggtagaaatcctcctgccgtcctggtggcagattgtcagagacagcaacatgatgctgaaagcaaaggtgtcttcctccccgcgcggcgagtcatttgtcggcatgaatgcactgcttgatttcaactggcggtttgcgacaaatggaattgaactgactgaggctgaatttaatgagcttgtcgccagcaacaggcgccttgttaatatccgcgggcaatgggttaaaatcgatccgcagtttatcaaacagatgaaacgcctgatggaaaaagcagaatcagagggactccacatgtctgatattctggcgcgggagctaatggatcagcaggatggcggacttgaggattcggacctgattgatacatctgcttttgccggcattcagtttgatctgtctaaacagctcaggtcactgattcgaaagctcactgccgcggaaaacctgccggagcacaaagtcagtccttctttcaaaggaacgctccgcccttatcagaaatacggcatgaactggctgctgtttctgcgggaaagcggttttggcgcctgtctggctgacgatatggggcttgggaaaacgattcaaatgatcgcctatttccttcacgtgaaggaaagcggccgacaaaaaacgcctcatttgattattgcgccgacatccgtacttggcaactggcagcgggagcttcaaacctttgcccctgatctgtctgtcgcgctccattatgggccgcgccggccaaagggtgatgatttcgccgcgcattatgaaaacgcagacgtggtgctcacttcatacggtctgtcacatgccgatactgaagagctttcttctgtgacatggaacacgatctgccttgatgaagcgcaaaatattaaaaacgcgcatacgaagcaatcacgcgcaatcaggaagctgaaggggcttcaccatatcgcgctgagcggcacgccgatggaaaaccgactgactgagctgtggtctatttttgacttcatgaataaaggctacctcggcagtttgaccggcttccataaacgctatgtgctgccgatcgaaaaagaccgggacgaaaagagaatcggacagcttcagcaattaatccggccattccttctccgccggacgaaacgggatgaagaggtcgcgcttaatcttcctgagaagctggaagaaaaagaatttatccctctgtcagccgagcaggcatccctttatgagcagctcgtcaaagacacttttgaccatatgacatccctgaccggcatgcagcgaaaagcgctgatcctcagcatgcttggacggctcaagcaaatatgcgatcatcccgcgctttatttaaaggaagagcaaaccgagctgctggccggcagatcagtcaagctcgaaaaattgctggaactgatgacagcgatccgcgcccaaaacgaaagctgcctgattttcacgcaatacattcagatggggaacatgatgaagcggctgcttgaaaaaacgttcggggaacctgtgcaatttttaaatgggagtctctccaagcaagagcgggatacactcgttgagaaatttcaaaggaaagaatatccgacactgattctttcactcaaagctggaggcaccggacttaatttgaccgccgccaatcacgtcatccattatgacagatggtggaacccggcggttgaaaatcaagcgactgaccgtgcataccgcataggccaggagcgctttgtccacgttcataaaatgattacgacaggaacaatcgaagaaaaaattgatgtcatgcttgaatccaagcaaaccctgaacgatcaaattatccaaagtgaaaactggattaccgagctttccacacaggagctcgaagaattgtttacattaagcgctacagcgcaataatcatgactaaaaaagctggctctaaaagagccagcttttttccgttcatagccgtcacgccgaatttccaaaaaatccgttacgccggttatcaacagggtgcgcttttgtggcagcacatatacttacaacaaatgtttcatcatatgtgcgacaccgtgttcgtcattggttaaggtgacagcatcggctatcgatttgatgtcttcccgggcattgcccatcgctacaccttttcccgcagcctccagcatcgatttgtcatttaaactgtcacctacagcagcagtttcctcgagcggaatattcagctgttttgcaagcctcttcagcgcctgccccttggaagctttgcgggaagaaagctcaaagttgtgctcagccgaactgacaagcgtcaaatcttcggcatgctcatatcttttccagcctgcctcaagcttttctttgaagaaagaaaagccgagaatattgtaaaaatcgattggctcatcggcttcaaacagctcttgaaaggagttaatgtaagcaaagcccgattggctgtattgcacctcggccgcctgcttaaggacagaaagatccgcttccggatttgcgcttctgaatctgtcgagctcaacatcaagaagttctctgccgttttgcggcgtataaatcgctgaacctgtgaatacctcataataatagttttccgactcaagccatgagagaatgtcatacgcccgtttcttatcaatcgtttcgtgatgataaagcctgccctcgggatcgtgaatgacggcgccgtttgcactgatgacccatgttttgatccccagcggttcaaagattgacatgacgtcaaaatgagcgcgcccagttgacaccaccacttcaatgccgtcccgctgcgcctgccgcagtgcgttttcattttccaagcttacctgatgcttgctgttgagtaaggttccatctaagtcaatcgcaattaatttcacgtttgtcagtcctttccttcatcctgctctgtcacgagaagctcaacgccgtttcggtcaagcaagtcacaaaatgcctgattcggcagcctgtctgtaatcaagaggtcgatttcattcagctccgcatactgataaaaactggtgctgcccagcttagaatggtctgcaagcgcaattacctgctttgcctgctgtatcattttccgcttcaccatgccatcctcttcatgcgcaattgtaatgccatgttcggaaatgccgaccacaccaatcagcgctttatcaacatggtagcttgagagcttttcaatcacagaggacccgtacagaaagcggtgctccttttccagcttgcctcccagcagataaatttcaattccctctttatcggacagcacatccgcaagattaatcgaattggtgattacggtacaatcaaccgcattcaaatgctttgcacatgcctgaacagttgtagaggcgtctaaaatcacccggtctccatcatgaataagcgatgctgcaagcctgccgatcttatttttttcctcagacactgttttcaggcggccggaatagctttgaattttctgatgcacagtcggtaaaatggcgccgcctcttgtgcggatgatggcattctgttcctcaagtttcacaagatctcgtcgcgctgtatcccttgacacttgcaggagcgtacagatctgctccgttgtaattcggttatgctgttttaaaaaatccaaaatcgctactaatctttcttcttggtacacgccctcattccttttctcagcaatcatttataagtaattataagtttttatttgattttattcaacattaataagtgattttaagtaaaaatgcgtcgagagaaccaatttttcctaagtaggcaaaaagaaagaaccagtctggtcgactggtcaattttgaggggatgatgcgaagatccggataatagtgaatggatagataacgggaggagcaggggtgtcaatcagcagctttttcccggggtttagggtccataaaacgaacagtgtcagccaacacttctgttacatacacgttaacgccttcctcgttttcatagcttcttgtctgaatccgtccgcttacgccgacgagagaacctttttggcaatacaacgccgtgttttcagctgtttttctccaaagtgtgcaattgacgtaatcagcttcgatttcacctgaagcattcttgaagctgcggttcaccgcgagcgtaacatgtgcaactgccgcaccggcggaagtgtagcgaagatcaggatcttttgtaagacgtccgacaagcatgacctgattgaacatgcgattcctcctctccttgcggttgtatgtattgtaaatgatgcaacaagaaaagaaaaacgcttaaaaatggctttcagcctctgtttttatctttcgttttcatttttccttcagctaaaaacatcttttgcttttttcctttgaagaaatatgtactttttaaaaaacggaaaaagatttgctttgtcagccagttttgcgtattcatgcgcacataggaagagccatcccacgcaaaccactgaaagctcaattttttttccggcattgacagcttgattttatactgctccatgccatcttgtgtttcgtataaaaaacttattcttccttttttgttcagatgaacctcaaacacttctttacggcttaacatatatgttacttccttttgaatcaaatgactttcagaaggaacgccgtcaatataaatttcttttaaacgaaattgattcataccacatctctccgtaatccatagtcagttacagtataatgaaaaaatagaaattattaaatgtttcgctcatacaaaattctttagccccaacattgcaggattttttcctcgaaaacgtttatgttataatggaaggcaagaaaactttggaagtaatcggggtgagaagaaatgaaaacctttaaactggttgacctgaatgtggaacgagtggacaaggaagaacaatcaattgaacagtttccccttattgacggactgattataaataaagaagacggtgaaaatcactggctgattgaggcgcttgtacagaaagaacatctgtctttttttgaacagcttcaaaacagccaatctgaagccaaagtatttgtaacgatcacgaaaaaaagcaatcgccccgcccagctgacagcagcagtgaaaaatatcgtcaagctggaagaaagcattcaggttttactctacggacaaatggtcacaagaaaacagcagggcactgaaaccattctcgagtcccttgtaaaagagggctatacaggaacaaaactcattgaggcatttaagcaaaaattataaatatgagggggcatgttccccaaaacagactcagaaccgaagagcatcacaatagacatttagaatagatatgttctgcatgaaaaaagctgccgttttgaacggcagcttttctcttcgtgctttcactcttgcatatttaatttgtatggccaaaagaatcaaccaattcccctttcacaacgaggcgcccttcggttttgaccgccttgtcacatgtgattaacgtaatctcctttttgtttgtctcctcaactacatctgcatccatttccgatatgatgtctttcgatgttacagaatagatataatcctttttaaaatccgtgatgacaatttgggcacctgtttttatgttttccagaggtccgaacagaagattcttttgcttcaaatgatggcccgccaacggataatttccctcacccattttttgatcccggcgcattgttgccgcccctatcaaaagattttcattggttgtgccttttacgatcggaagctccagatcgacacttttaattgttatccgccgccttgattgtgaagtaaaaataagtatatttcacgtgctttcgacgttctccacttgactggaatgctttaatggcgatcccggcatctgtagcttcaggctttccttcagaggaatcagaaatctcaaactctattttctcagtgttcagcacataaccggctggcgctttcgtttcaacaaaagcgtattgtcccggtgcaaggcctgaagctgtgacttgatgatgccggatatgactggtttcgaagtctgtatgaaaattcgcgaacgattcagcatggttgatcttccggttctgatcattacagctgccattatcggccatgacaaatacaaggcttttcatgccggagcgaatgacattttgcaaaaaccctatcattactctgaatttatggcgcgtattcaaaacctgataatgatgaaacatacagcaaatcaagccacaagaatggaaatggcgtttctccagtcgcaaatcaagcctcattttctttataatgtattaaacacgattatttctctcactcatttggatattgaaaaggcccgggaggtaacagaggaatttaccaactatttaagaatgagttttgactttcaaaatacatcagccatcagttccttcagacatgagctttcgattatcaattcctatctttctatagaaaagacgcgattcagtaatcggcttgaggttcttttcgatatagatgaagacattgactttatccttccgcctttaatgattcagcccttggtggaaaatgccgttcttcacggtgtcagcaagaaaagaggcggaggatggatcaaactgacagctaaaaaacaaagcaaaaatgagtatcacatcaaagtagaggataacggtcccgggataactccggaaaaacaaatagatctcttatcaacggattttgatcgcagcgtcggattgaaaaatatcaatcagcggctgaaacatttttgcggaagcgagttgatgatcagcagcactccggatgcaggcacctctgtctcaatgctcattcatctcgctgaaacaacaggaagccctaaagaactgaaggacacagaacgaacctaaacgaaaattgagataaaaaaagacgccgtttctaacggcatcttttttattccggcgactttgcttgctgcttcagcaggtctctgatttctttcagcagctcctcctgcgcatccaccgcttcctccgcagcctcttcttctgcttcttttttgcgccttaacccattcaaagtccgaatgacgataaaaatggagaacgatataattaagaagttcacaatcgtctgtataaagctgccatatttcactacagcatcgccaaacgtaaacgacaggcctgaaaagtcaagccctcccagcagcaaaccgaccaaaggcataatgatatcatttactagagatgtgacgatctttccgaaagcgccgcctatcacaacaccaatcgcaaggtctacgatattcccccgcatggcaaaggctttaaattcattccacatacaatcacctgcttttctatatttgtaaagaaaaaaagacaaatgtgccgctggccatctgccttttttcaattattctccgagggcaaaagtcagttctacttcgcaaacgacttcgccatcaactgtggcaacgccttttccgcgcccgattgtgccgcgggcacgaatgatttcaacctcaaggtgaagctggtcaccaggcttgacttgttttttaaagcggcagttatcaatgcctgcaaaaaaagccagtctgccgcggttttcttctttaatcaacatcgcaacagctccgacttgagcgagtgcttctacgattaatacgccgggcataaccgggtactgaggaaaatgtccgttaaagaactcttcattagcggttacatttttatagccttttgcccgtttgccctcttcaacttccgtaatccgatccacaagcaaaaacggataacggtgaggaataatttctttaatttgctgagtatcaagcattgtcttgacatctccttcatctgcattagtatgtatagcaatcatcaaagatccaatctgtacatttgaaaagtatattatgaattaatctctttttcaaccgcgctaaaatgtaaccaactgtcaatgagagccgtcaaaagttatgatatgataattatagattttaccaatagcaaagaggtaggaaaatgatttcgaagtttattgaaaaaagaatgctaaacatgttagacgagtggtattccgcaatgagcaaacgcaaaatgaatcacgtttgcacactgaaagagaaaattgatcagcaccttccaaagatcaaaaagaacacaaaactttggatgcgttatcaattgtttcaggcccgccatcagctgctttttgaaaaccagaacggactcgattcattgttcgatggcctatatggcctggaagacaaaatggatgatgaattgaaatattatctgtattttttctctgggttatatgagatggtaaaaacagctccgaaacatgcagtacatcattttaaaaaagctgaacagtacctggccgccattcacaatacgtttgaagccgctgatttatattatcaaaccgccggcgcctattacttgatgaaatcaccgccgctttccgtccaatacgtcaaaaaagcattacacatctatttgcaccaattcggctatatcaaaaaggtaatcacctgtaaacttttgctcgccgtgaattatattgatcaagaacgctatgaaaaagctgaacagcttttcaaagaaatcattaagaaaacccagcaactacatgacgaaaacctgctatgccacgcttattataaccttggctttttaaaagcgaccgagaaaaaagaccaggaagcgcttctttactttagaaaagtattaaagaatcaagaatttgaaatgaattcaccagtctcatatcttcattgtgtgtacgagtctgtcagagcgctttttaaaacagggaacatcacagaagctaaagccgtccttcaaaaaggaaaagaattatctgaaaaggtagacattcaaaccatttatttaaaattaaaaacgcttgaagccctctacacatcagccgaagacccttatgagcagctgctcgaatatgtgcttgaattagaaaaaatcgaggcgtgggtggatttagaagtgctgttagaagatattacggaatactacaaaaaaaaggacgatttcgaaaaagccgctttttttatcatgcgcggctgattgaaaaacgcccattttcttattatctgactgaattgattaaaccgagcatttgatctcccattgtgatcgttctgctgttcagctgatatgaacgctgggacgtgatcaaatctgtcatttgttctgaaatatcgacattggacatctcaagtgagccctgctgcatgccgatgttttgtctattagcgccgttcagctcttcaaaagctgccgcattatcaatagagaaaaggttattcccttcggatttcagctcttgagggttattcacttggacaacgccaagattaaaccgctgaaccgcgtttccgtcagatgcggttaaggtgccgttcttattaatggtgatattcttcattgagctgtcgatgttcactgtattgccgttctcatcaagtacgggatacccatttccagtgacgagctgcagctggttggcattcgcagcggacggcgttacatacagcgccccgtccctcgtatactggcggtttccatttacatttacctgaagatactggtatggagacgtaaatgcgatatccagatcgcgatcggtcttctgaatgcttccttgatcagagactaggcgtgaactcatcatcgctccgacgccaaggcgcaagccgggcggcgtttttcgggcttttgccacttcctcgtttttttcatcaacctgatcgaattgctgtctgacaagctcagaaaaattcgtatcttttgccttatagccggttgtgttgctgtttgaaaggttgctgctgattgtgtcaatctgctgctgcagctggtttaaggttgttgatgccgttagcattgacctgagcatagttgatgtcccccgtttttttcttccgttttcttaaatttttccaatttcatttgctgctttatccatacttttatcgtaagcctgaataaccttctgattcgcctcaaacgatctgtacgcttcagtcatttctgtataggcgcttgtcacatccacgtttgaaagctctgagacgccttgttttaatgaataggctacctgattatttccggctgcgcttggcagatcattaccgtccgccgtgctgtacaaatcatttccgtcccgtttgagattgcggacatcttccgccattctgacatcaatctggccggctgtgcgtccgttcgttgtcacagtaccgttttcagacacagtgaaattctcattatcaacagtgattggctggcgatccgtcgataaaatagggcgtccgttgatcgtcagctgattgttctcatttagtgaaaatgtgctgctttttgaataacggattccatccgctgtttgaaccggataaaaaagagcagctttttcattggtttccgcactcatcggaacttgattttcgatcaatgcaatgtctgtaggctggtctgtggacttcaggcttccctgtgtaaagagaggcttgagctcctgcatatatactccggtattcacggaaccgatttccgtccttgatgtcccggccggagattttgattctattctgctgagcagcatctcagggaacgcgcgcatagagccttgatcagctttatatcctgatgtatttgcgttagcaatattatttgaaagcatttccgttcttcgctgctgggcaatcattgcggatgttgctgtatataatccttttaacaaatttcccacctctaaaaatggcattttttccagttgtcatataggaacgttcgttctataataaaaactcagtattttatcctattatcgtcatttaacatcttttcgtgaaggctttttcataaaaaaacctcattctttttcagaatgaggtttgtgaaatcagcttagtttgcgtttaggaagcttgtccatattatcaagcatgacacctgtgccgatggctacgcaatccataggattttcagcaacgaggaccggtaccttcagctcttcagcaagcagctggtcaaggccgtttaagagcgcgcctccgccggtaataataacgccgcggtcaataatatcagcagaaagttcaggcggtgttctttcgagcacttgttttgcagcctgaacaataacagcgacagattcacgaagggcttcttcaacttctttactgtttactgtaattgttcttggaagaccggaaaccatgtcccgtccgcgaatggaaatttcctcgtgacgtgcgtctgggaaaacagttgcgactttaatcttaatatcctccgcagtacgttcgccgatcagcagcttgtactcgcgtttgatataatttaagatttccatgtcaaacttgtccccagccattttaatagaagaggaggtgacaatatcgcccattgaaataaccgcgatatccgtcgtcccgcctccgatgtctacaaccatgttaccgcttggctggaatatttccatacccgcgccgatagcggcaactttaggttcttcttcaaggtacacatgtttcccgccgcttttttctgcagcttctttaattgctttttgctcaacggatgtaatattcgtcgggcagcaaatgagcatgcgcggctttgagaacaggccttttacattcagcttgttaataaaatgtttcagcattgcttctgttacttcaaagtcagcaataactccgtctttcagcgggcgaatcgcaacaatattcccaggtgtacgtccaaccattcgtcttgcctcttcgccaaccgccagcactttgccgctgtttttatcaagtgcaacaacggaaggttcattcagaacaattcctttacctttaacatggatcagtacatttgcagtaccgaggtcaataccaatatcccttgcaaacatctatttatatcctccttgaaaatctgtttcacagtaaatatccacattgtgccctaattatatatattatcataaaatatagaaaaaaagttggaagcacaataagttctttacaaatttttgcggatgttttatgaacgatttcaagaaggcaatgccaggtgattacgattgctgaacaggctctccttcgagaatttcatcttttttatatttgagctttgtcgcttctcctcctcttaaatgcctgatggatttatgataatcgagtatttctttcacttcgtttgccaagtcggggttaatttcaggcagacgctctgttaaatccttgtgtactgtacttttggaaacaccaaattccttcgcaatgacacgaacggttttctttgtctccacgatgtacttccctatcttgattgttcgctctttgatgtaatcgtgcacaccactcgacctccctaaaatggatgtgagaagtgtgaaatgagatccgtattctgtaaagagtcgttcattatgccgcttcttcgttgtatggttttaaaagtaagtttgtgaaatatgcccacgatccctcacctcaaacactctctttgttaggtttgtaacagtgtattagcattcttttgggaatatgctaaaaactcaataaggacaaggggtgaaacgaactttttcagattcagcaaactatttcgcgtcactaaattttcatctttacaactattgatcgctcctgtaaaatgaaataagcaattagttacttaggtaagttttttagaaggagaccgacatgtcctacgtcaacagacacctcattcatcaaatcaaccaaagcgcccgcctgattgccaagaaagccaatgaacagctagagccattcggcctttattcatctcaatggtcagttttatattgtttgcgtacgatcggaccaatgactcaaaaagagatttggtcctatttaaatgtggaagcgccgactgtgactcggacgatcaaacgcctggaggagaacggctgggttcagagacggcaaggtgaagacaaacgggaaaaacttgttgtcctcacaaaagaagccgagaaaaaatacgaagaaatcaatgtgaaaatgttgaaattcgaggaagagctgcttgcagatttccgggatgaagataaagaagctttttctcatttattccgcatgtttttacaacaatgaaaataaggaagtgacatacatttgaaaaaagcggatgcgatatggaccaaggattttattatggtcctgcttgtcaatttatttgtgtttgtgttcttttatacatttttaactgtattgccgatctatacactgcaagagcttggcggcacagaatcacaaggcgggcttttaatcagcctgttccttctgtctgcgatcattacacggcctttctccggagccatcgttgagcgtttcgggaagaaaagaatggcgattgtatcaatggcgctcttcgccctatcatcttttctgtatatgccgattcataacttttccctgctgctcggattgcggttcttccaagggatttggttcagcattttaacgactgttacaggtgcaattgccgctgatattattccagccaaacggcgcggtgaagggcttggatactttgccatgtctatgaacctcgctatggcgatcgggcctttccttggcctgaatttgatgagagtggtaagctttcctgtattctttacagcctttgcgctgtttatggttgcgggcttacttgtttcgttcttgataaaagtgccgcaaagtaaggacagcggcacgactgtattccgttttgcgttctcggatatgtttgaaaagggcgcactcaaaattgcgacggtcggtttgtttatttctttctgttattcaacagtcacatcatatctgtctgtattcgccaaatcagttgacctttcggatatcagcggatatttctttgtttgttttgcggtgacaatgatgattgcacgcccgttcacagggaaattgttcgacaaagtcggaccgggcattgtcatttatccatcaatcctgattttctctgtcggactctgcatgctgtccttcacacatagcggcttaatgcttctgctttcaggggcggttatcggtcttggctacggatcaatcgttccttgcatgcaaacattggcgattcagaaatctccggctcaccgctccggttttgcgacggcaacgttctttaccttctttgacagcggaattgctgtaggatcgtatgtattcggattgtttgtagcatctgccggcttctctgccatttatttaacagcggggctgttcgttttaattgctctgcttctctacacgtggagccagaaaaaacctgcagaggctgaaggaaaagtgtctattgcagaataacttgtcagactgccgggaaatcccggcagtcttttttccattaaaacacggcgccctctcggttgaacgagagaacgccgcttatagcaattattcaatgacaggccgcgcaggtgaatcaggatctaacgaaaaatcataggacgcttcatcacgaaacatcggatcggcatatatggattgttgatcgttttttgttgcttttcgatacgaagaaaatgaatcatattctttctttttccacatccatatgccgtcttgatccgcttccttgtggtacacgttatgattgaccgtattaccttcgttttctgtaaagtcgtttccgataaataatctggaatcaccggccgtcaatatattcttttcaattgtgttgtttttcgtatcgtactgcagcagcagctgtccgccgtacagtccctttgtgtcattccggtacataatattgcgggcaatcagagaattgctggtgccgccccgctttttgtcatatcctccgattgaaataccggtgtacgcattgttgtacactttgttgtctgtgatctgaatggcatttgcatactttcctttgtgttcagacgttgcttcaatcccaatatcgttatcgtaaactgtgttgttcttaatttcgatatcgtgtcctccatcgacataaatcccgcccgctgagtattcatctccataagcaggattgccgtaagtcgagttttgataaactgtattgttttctacgactccgtttcgcacgtaatcgtttttatccgcggttccctcataaccaattagatcaatcccgatgttattattgttgcggaccacattgcctgcaactgtgaagccgtcgatattaccgttcagcacaactgcttcactcgctccaagcgtcagtttctcaactgtattgtcctcgattcggatgtctttcatgctgccagtcccataaactgcgattccgtgagcatttccttcatccgctgttgtcttaatcccccggatgtgattatccttaatggcgatatgactgctggaccctgatacataaatccctatagcagttgcttcctcagatgaaacagaaagatcttgaattgttaaaccgctgatggcaatgtcatgtttatcgtgaatacgaataagcggtgtttcatattcagcgttcgcaacggattcaccgctaatcacgacgttttcattttcatagtttcggaatgtgataggctttccgtccgtaccgctgtgctttacatcaagggtctcatgatacgtgccctcccgaatcatgacagttgtgccggcagcagccttctcagatgcgtgtgccaatgtacgaaacggcttttcttttgttccttcattttgatcactgccatttggcgaaacatacagataatccccagatccttcctcattcgcttttgtcttatcataaacgaaagcgaggatgacagacgttaaaacacccgccaaaagaataaaataccattttctcattttcgattcccatttcgttttagaatagatttctaaaaccattataaatgttctatttatggaaaaccatttcaaaaatatgaaaatataccgtctaaatagatcttattcagcctggcggacctgcgcatgttcaactgtttcaattgccaatgatgcaggcgggtgaacacgcatcagaacaatgtagaaaagaaaggaaatcagcacacctacaaaccaagaaatatcgtataagctcttcaatacaggaacatacatgccaatcagcgaaatcagcgctcctaacattgtggctgcaaacgcacggtaattgtagcccttccaatacacataccgtcctgtttcggaatacaggtcatctaccgagagctcacgtttgcgaatgataaaatagtcggccatcatcacgcctgccaccggtccaagcatgccgcctattaagccaagaaacgcatacacgcttgtcgcgctctccatcagcttccacggaaccgtaaataaagcgagcaacgctgtgataaagctgccacgtttgaaattgatatatttcggcagggcattcgctatatcataagcgggtgatacgatattcgccgcgacatttacagagatcgtggcgatgcagagtgtgatcacggacaagacgatgacataagggttatcaaaccgcgccaaaatatcgacaacatcccaaatcggctctccgaacgcgacctgcgagccggaggtcaccgtaatacttgcgaatgcgaacagcgcaaacgttcccggcaaaccgtaaaattgtcctttgatttgctctttttgtgtttcagcaaaccgtgtaaaatcaggtatatttaagatcaatgtcgcccagatgccgatgatgccagtaactccggcagcaaacggccagaatgtttctgaaaacgtatgaaactttcctggttgagagtatatcgggcccaatcctccagcaatatcaacggcccaccataccatgccgccaaataccagatacactaaaggccctgcccacacctcaaaacgtttaatcgactccatgccgtgatgcaatacgagtaaatgaatggcccaaaagaatacaaaggaaagcaaaccggacaagtgaatgccgagaatgttccactcgccgccaatttctccccaacctggccacatattcaaaagcaaaatgttcagtgccgtgctacccgcaaaggtctggatgccaagccacatgatagctgtaaacgcccttagaagcgcggggatattcgcgccgtatatcccgtaagaagcccgaatgatcactggaaacggcagcccgtattttgtccccgcatggccgtttaaggcaagagcgccaaataggataagtgatgccgtaataatgatcgccagcacctgccaaggcgaaaggccgatcgcaattaatcctcccacggtcgcgtaggtcggtatgttatgtatacatcccatccaaatggaggcaaagttcattgctttccacgtccgtttttcctgtcccaaaggcaccagatcttcattgctcagcctgttggattgctgctgactctcttttaatttcatagccggctcccctttccatattgtctatatgtcgtcacacgttatgttttttgacattagatgtcacttaatataactgaagagtcagacaataacactggctatgatatacaattttcccgtttgtatttgaacagcttaaacaagaaaaagagacagacctcagagcccgtctctttcttaagatgcagttttcattaatgcagcaaatctcacagccattaacaggcttgctccgcccgctataatcataatgattcccatcatatcaaaatgggctgccgtgatttctttaccaaaaagaatgccaaggatcaccgaagacaaaatcgatcctaggtaacggcaggtttgaaacaggcctgaagtcgttcctaccatgttggaaggactcgtttccagcatcgctgcctgaagcgcgacattgcccagtccgtagcctatacccaagagcgacagaatgaggcctttaccgatggtctggacattgataaaaaagatggttaagagcacggctccagccgtcatcaaaagcgctcccgcaaagatcggcttgacgacaccagatcggtcgatccatttgccggttagaggtgacacaacgatgctcattccagacataaacagcataaacaggccgctcgtttgaacagaaagatgcatttcatcctgaaagtaacttggcaaaccaaaaaataaacaatagaagaaaacattcaataaaataaactgaacatacacggctgacaggtttcgctgtgttttaaacagacggacatcaataaacggcttatccgttttcagctcgcgccagacaaacgcacagagcagaagcaagccaagcacaccttcaaccgcatgcggcgacgtgctgaacgacagcaaaaaggatagaaggaaaatgattcccccggcaaataaaacaattccaagaatatcgagctgccgaataatggttttgattcctgccccttttttctgatctttcgggaacatatacaggcccaataagaagctgaggataataaacggcaaattaacgataaagatcgccggccagcctccccatacaatcaaaaacccgccggctgtcggccccagcgccgtcatggcggacgcaaaaatagagagtacagccaaggctgaagcttggcgctcatgaatatgattccgaatcaagccgacacctgacggataaatcgcactgctccccaccgattgaaacagccgcatgaccaataatgtcataaacgtcggcgcaaacggcgccccgatggcagaaaccgcaacaagaataagcccgaataaaaacaagcgtttccgcccaatcaaatcaccgagctttcccgttacgggctgcgctacggcactcgccaagtaaaacgaggaaatcagccaggaaaccgttgtaaacgagaggtgaaactcatgctggatgctatggagcgcaagagagatcatagacgagttcagcggattcagcattgttcccgaagccacagctgttaaaaaaacagctcggctttttttcgataacatcatttcacttgttccagaaactcttccgttgtccgcgatttaccgattctcgggaaaataaagcgcagtgtggcttcatgctcttcatcgctaaatgtggacatggcatctgtaataaaaatctgctgatagccaagctgaaatgcctcccgtgctgtgctttccaccccgatattcgttgcgatgccgcacaatacaatcgtatcaatgccgcgacgtctcagctgcaagtctaaatctgtgccaaaaaaagcaccccattgccgttttgtcacagtataatcgccatcctgcacaccgatttccggaacaaattcggcccagtccgccggcatttcccctgaacctccctgcgcaggctcatccgtttgcggcttcagggcgtccgctccatcatgaaaggctacatttacaaagctgatgaacccgttatgtttccgaaattcatctacgagctttttcgcgttcgggacaacctggccgctttgatcaatcggcacaattcccttttgtaaatcaatgataaccaatgctgttttttgaaaatcaatgttgagtgtattcatcatacgtctcctcctgatactgttagtgtttctcacattgcatattttactcttcacactgcctaagttcttttatgatgcttgtgaaattctcagaaggagcgttttctcatgatttttcttttatgtagtagtaacaggttgtgcatacgaacaaaccggcaagcactgtaatcataaagggcgtcatcgcttcatcacctgcctgctgtctatcggttcctgcctgaaaatgcccatgaatttgcggcggtccatccaaagcaggataagacacataaccattaatatcgtgctaagatcctgcacgccaatatcaaaacaatagttaatcaagacgatgttcacaataatgggcataaaaataaccgcccctaatgcagccgttcgcggaatcagtaataaaacagctgccaggatttcaccaaaacctataaacagttcatagacatgagaataaccgaaaaatgtccacgcgatcgtaaaccccttcccggcagccgcctcgatttcaggcgtcacctcgccaaactggccaattaccactttcgccagaccgtacacgaaaaaattaaaggctaaaaacaatcggaacgtcgcgggaatcgacttgcgtaccgctttcctcagcctgccgcctttattcatcatacatccccctcagtgtattatttgatgtagtacacttaatacagtatagagtattctaattaatgtcaattcccttttcagctcatatgaatagtttcttttatagatacaaagtcttatatcgcaaaaaatgccattctccttcctttccatccctcgataacatttctcaaaaaccatgtcaggaaatcttacatgaaaatgttttatcattcttttttctctataatgaagaaatataataattgctttttattctgaaagatacggaggaatgagacatgcaaatgggcgatacagtttttatgttcttttgcgctttactcgtgtggctgatgaccccgggattagcgttattttatggaggaatggtaaagagcaaaaatgtgctgagcactgccatgcacagtttctcttccattgccatcgtttccatcgtttgggtgctgttcggatatacacttgccttcgcaccaggcaattcaatcatcggcgggctggagtgggcaggcctcaaaggggtcggatttgatccgggagattacagcgataccatcccccactcgttatttatgatgttccaaatgacgttcgccgttctgactacagcgattatttccggggctttcgcagagcggatgcgattcggcgcttttcttttattctcggttttatgggcctctttggtttacacacccgtagcgcactgggtatggggcggcggctggatcggccagcttggagcgctcgatttcgctggcggcaatgttgttcatatttcctccggggtggcaggacttgttcttgccattgtgctcggcaaacggaaagacggtacagcgtcttctccgcataacctcatttacaccttcttaggaggagctttgatttggttcggctggttcggctttaacgtcggcagcgcattgaccttagatggtgtggccatgtacgcgttcatcaacacaaacaccgcggctgcagccgggatcgccggctggatcttagtagaatggatcattaacaaaaaaccgacaatgctcggagcggtatctggggcaatcgccgggcttgtcgccattacgccggctgccggatttgtcacaccgttcgcttccattattatcggcatcatcggcggagctgtttgtttctggggagtattctcgcttaaaaagaaattcggatacgacgacgcgcttgacgcctttggcctgcacgggatcggcggcacatggggcggaatcgcaacaggattattcgcaacaacctctgttaactcagcgggcgcagatgggttattttacggtgatgcaagcttaatctggaaacaaatcgtcgccatcgccgccacttatgtttttgtatttattgtcactttcgttattattaaaattgtaagcctcttccttccccttcgcgcaactgaagaagaagagtcacttgggcttgacttaacgatgcacggggaaaaagcatatcaagattctatgtgaggagtgacgctatgagcggtcaaatgttcaaggtagaaattgtaacgcgtccggcaaattttgaaaagctgaagcaggaactcggaaaaatcggagtgacctctctgactttctccaatgtacacggctgcggccttcaaaaagcacatacggagctctatcgaggggtaaaaatagaaagcaatgtatacgagcgtttaaaaatagaaattgtggtcagcaaggttcctgttgatcaagtgacagagaccgctaaaagggtgctgaaaacgggatcaccaggtgacggtaaaatatttgtctatgaaatcagcaatacgatcaacatccgcacaggcgaagaaggacctgaagcactttaatatcggtacgagattcggacactccggatctctttttttgtgcacagaatccccccagaaaccgcgattcctcttcgaattctcttcaagcgccgttatttcagacaatctctatttttatttgaaacttttcatgagtaagattagtctactaaatataaaaatgtaaaaggtgattatttgaactacgaaatttttaaagcaatccatggactatctcatcacaattcagttctcgattccattatggtcttcatcacggaatatgccattgtcgcctatgcccttatcctattggcaatctggctgtttgggaacacacaaagcagaaaacatgtgctatacgcaggcatcacaggaattgcaggccttgtgatcaactatttgattacgcttgtttatttcgaaccgcgcccgttcgttgcgcatacagtgcatacactgattccgcatgctgcggatgcttcatttccaagtgaccatacgacaggtgcattagcgatttctattgcgatgcttttcagaaaccgcaaaatcggctggccgcttgtcatttttgggcttttgacaggcttttcgagaatttgggtgggacatcactatccggtagatgtattgggcagcctcgttgtcgccatcattatcgggttccttttctttagattttcagatctgcttcgcccgttcgtcgatttggtcgtgaggatctacgaagccattatcaataaactgacgaaaaaaccaaccgatcaaaatttctaagaaagacaaaagccggcgtctgaaatcaagacagccggctttaatatttctcatacatctcttgttttcttcgcttcgccaacacatataaaccataaaacaacccaattccaacagcatcgatgagcacatcccggatacaaccattcctgctgaagaagagctgaagaacttctgtgaaaaaagcaaacgcaaatgagccggctgcagctgatcttatgctgccccgctgtttccacagcaaatatgtcagcacaaagaaggaaaacgcgtgtccgattttttgaataaacgcttcaggtacagtaagctcagtaaaatccataactaaaaattgagacagatcagggtgcggctgaaaatgaaaagccaccgtttgcgatacgaccatgccgctgaagctttccgtacagacagaaagcaggataaaaaagatccagcctgcgagcaataggcggttcatgacataacctcctttataacgtacgtgcctacatgtaactacatagacggtaaaacaaagcaaaaagtaacagaaaaaaacgcccatcacaaggatagacgttttcttcattaagactgttcagtgtcttctgttgtgctgctttctttagaaccagatttgtcagttgaatcatcctttttctcaccggatttttcttctgttcctttttcagttgatccgtcctttttctcggaagattgctgaatggattcttctgtttcttgggtggcagctttttcaatagaagaaactggtttgtccataaagtttaacggattcattgcaaccccatctttacggatttcaaagtgcacgtggtttccgctgtcttcactgtaaaggttcttgccagattttccgatcacttgattttgttttactttgtcaccttgctctacgcttacttcggaaagagattgatacacagtcgataaaccgtcggcatgttctacttccacaacatatcccagcactggatctttttcagctttaacaaccgtaccgctcagagaagcagagacatcgaaatcttttccgtctttctcagctaagtcaattcctttgcttaggctgtacgtgttattataggtaacgagtgctgcttctttctcttcttttgcggcatcggtttcatagaactttttcacaacagaaacgttttcagaatcaacaaccggcattgcgacattttccattgactttcctacttcaactgcatcgtcgttgttgtcatatgcggagtttccgccgttatcagccaactgatcctttacctcatcatttgatactgattgataccaaaggacagctgttaaaatgacggccgcactgactaagtaaattgcagggaacacccagcgtttacgaaaaaactgctgaagttttttgacttgagaagttttcttttcttcctctctcattgtttcatcacctcagcaacattctgaacacttttctgaaaatatatacaacctatccaaaaaaacttttttagatgtagtttgcacagactgaacgaaaatatgtatttttttgagaggagtgccaaaaacgtatgaacatgacattgcgtcttgctgaacatagagacttggaggctgttgtggcgatttataattcaacgattgcttctcgaatggtaacagccgataccgaaccggtaactcctgaagaccggatggaatggttttcgggacatacagagtcacgtccgctctatgtggccgaggatgaaaacggaaacgtcgctgcctggatcagctttgaaacattttatggaaggccagcctataataaaacagcggaagtcagcatatacattgacgaagcatgccgcggcaaaggtgttggatcatatttgcttcaagaagcgctccgcattgccccgaatcttggcatccgctcacttatggccttcattttcgggcataataaaccaagcctgaagctgtttgaaaagcacgggtttgcagaatggggactattccccggcatcgccgaaatggacgggaaaagatacgatttaaaaattttagggagagagctttcatgattagtctggataaagatgaaaacgaaattgaacatcataatgaagaaaatagccttgttgaacaggagactgcacctgttggacaggagagccgccagctgagcgcctccgctgtcaagtcgctatccgacattgccaagtggggcaaaatttctggcatcttgttaatcattatgggatcgcttgtcactctgtctgttttgatgacagtgattggcgccatcccgggcgtactgctcattatttcaggcgtatttttgatgcgctcagcaaaagcagccgcggaagccgaaggaaatctaaccggcagcgctggcgaaagcatgcttgaaaattacgggacatttataaaaatgcagctgttttatgcagcatccagtatcgttactgtcctgatcgggatcattgtagccattttcgtgctggtggtaatcggcattgctgcttttgagaacacgccttcgtatgatgatccggattcttattattatgaggatgatccggtgtttgaataatgatgagacaggacagggcatgagttccatataaacggaaccatgcctattttatttgactattcaaagcaggccggcgtaaacaccaaatcctgaagcaagcatacaatagacatctctagtagaggaaatcaacaaagcaacgctgttacccagaaatgaatatcaaaaaaacggatgaagtcggaatcaatccgaaaccgcactttttatttcgggtgtctgcatgcaaaaaaacacacccggatcgtctggaaaatctcaacaatccgggtgcagatcttctttaatacatttttttgcgtctgtcttcctcagtcaaaaattcaacaaaactccgcatcgcaaaaggctcttcctttatttgtcgtgcgtaggagcttttccgctcttctgaaaggatttcgctctttttgatcctgttcagcatatagatgtgaaccgttttttggatttgtttatgctgatagcctgcctctttaaaaaatgcgagcccgagcgccgccaaaagggcgaatatgcctgcgctgatcagggactccctgtcagctgaagcatgaaatagaaaagcagctaaattaaagagagagaatgcagcaagcggaatagcaagaaaacggtaaatgacggtttttttcatgaaaggctgtacggccttttgaattttttgcatttctgttttgatgaaccccggcatttgttcgactctgtaaaagttcatataatcctccccctttatttgatgtttcaagcttcacgaacgttatcatatgtgtttattttaacgcaggtgcaagctggttttaaagaaatctgcccgtatttttcacgaagaatctggatcgccgctctttattcttttaaaatgtgagtgttataatttgtaatgggaatcagatcactgttattcatggaatactaatggcaatcttcttgataaatatgaatgagcggggttacaaagtgagtatttcttccatccttttatcactttttttcattttaaatattcttttggccatcattgtcatcttcaaagaacggcgcgatgccagtgcatcttgggcgtggctgcttgttcttttctttattcccgttttaggctttattttatacttattattcggccataatctcagacgcaagcatttgtttcaatgggaagaccggaaaaagattggaattgaaaggctgctgaagcatcagcttgaagatttagaaaccaagcaatttcagtttaacaaccgggcaacctttgataacaaagatttaatttatatgctgattatgaataaccatgctgtgtttacagaggataattcagttgacgtcattacagatggacgggataaatttcagcggctgctgagtgacatttcaaaggctaaggatcatatccatttacagtattatatttataaaggcgatgaattaggcaaaaaattgcgggacgctctcatccaaaaggcgaaagaaggtgttcaggtcagagtgctttatgatgaactcgggtccagaacgctgagaaaaaagttttttaaagagcttcgcgaggctggcgggcatgtggaggtctttttcccgtcaaagctcaggccgattaacctgcggctgaattaccggaaccatcgaaagcttgtgatcatagacggtatgaccggttatgtcggaggctttaacgtcggagatgagtatctagggcttaatccgaaattcggttattggcgggatacgcatatccggctgcaaggaacggccgtgcacgccatccaaacacgattcatccttgactggaaccaagcttctcatcaccatacgctgacatatattccaaatcactttcctgattacggcccaaaaggcaacgtcgggatgcagattgtcacaagcggccctgattcggaatgggaacaaattaaaaatggctacatcaaaatgatttcgaacgccaagcgttccattttgatacaaacaccttattttatcccagatgcaagcctgctggatgctttaaggatcgcttgcctttcgggcattgacgttaacattatgattccgaacaagcccgatcacgcctttgtatactgggcgacactttcgtatatcggcgatctgctgaaagccggagccactgtctatatttacgataacggctttattcacgcgaaaaccatcgtggtggatgacgaaatcgcttcagtcggcacagcgaacattgatgtccgaagcttcaggctgaattttgaggttaatgcatttatttacgatatcaccattgctaaaaaactggtttcaacttttaaagaagatttgctagtatccagaaaattcacctatgaggagtatctgcagcgcccgttgtggattcgaataaaagaatccgtctcgcggctgttgtcgccgatcttataagatgcgtaaacccccggcctttacggccgggggttttcctgatggtcacagtaaatgatgattgcctcccgcaaaaaagcggcaagaccttctccatattgattgattgaatcggtaaatcgctcgtcagtgatatacacttccccgagtcctctgaaaatgtcgagtgtgcaatcgtaatgatattggcaaatatgatcgcgaaatgcccccacagcggcctgaatctctgcatcatcgggcccatgcttcattcgcgccgcaattcgtctgtaaatcgaatcaaattcagccatgatcgtgcgccaatcatctgccgagtatgcagatgtccttttctctgtttcttctgcgatttcctttccatacagctttctgacttcatcagcgtatgtctgctggtgctcttcaatgtctttcatgcttaatccggcaaataaatccctcttattcatcgtttcccctccatcaacggacaaaagcgtcctgtcaattgtttgaatcatctcatccattctttgttttttcttcatcaatatctccttttgcgactgaagtgccgctttccggtcaaaattcggatgatccagcatctctttaatctcatccagacgaaacccgatttccttgaaaaataaaatctgttgcagtctttccaggtctgcgtcactgtacaaacgatacccagcatcagtaagcgctgaaggattcagaagctcaatattgtcatagtgatgaagcgtccgaatgctaacgcctgatatctccgccacttgtttaacttgatatttcatacataacacctcctcttttttatcgtaaacaatcacgcaacgttagggtcaatccccaaaatgttattttctatatacaaaacttctcacaaatagtgtataaaagaaaagtgagtatttttttgtaaaggggagccagtatacatgaatcctgaaacaatgaacaaaaccctcatcagcatttcgaaatggggaaaagctacaggcattttatttattattatgggcgcaattaccgcgctttcaggcgcgttcttttttctaatcggtgccgtgccaggcgtactgcaaattatttccggtatctttttgatgaggtcagctagggaagcaggccaaatggctgaacacaatagcggacagtctgaagacttaatgctggagaattacgcgaaattcgtaaagatgcaagggatttatttgatcgtaagcattgctgtatccattcttgcgattatcgccttcttcatctttttaatgcttgggattgctgacggccttttcagcgatacgtacagcacttattaatgagaaaaacccggagctggctccgggttttttattattccgcttcgcttaccactgtgaagcgttcatttttgtgttcgggatgttcaagctcgtccaacacggcaatggcataatctgcatagctgatatagctgtctccttttgcatttacgatgacattgtcttttcctttttggtaagagccagtccgttttcctgctggatcaaaaaatgccgcaggactgaggaacgtccaggaaatggagtctgtctgctgcaaatctttcaggttctcgccttgatttgatgcagttggcaaatattctttcggaaattccggcgtatccattaaacgggttgttttggcttcatcaacaaacaggcttcccgctccgccaacaacaagcaatcttgtgtgcttcgcgtcctttaaaatgctgatgagtgctcttcctgcttcaacatgaagatgttcttggccgggtgctgctccaaaagcgtttacgaccgcgtcgaaaggcttgatgtcttccgcagtcagttcaaacacatctttttccaaaatcgctacgtcttgctcctgcacttttgaagcgtttctgacgatggctgtcacttcatggcctctttttttcgcttctttcaaaatctcgtttcccgctttcccgcttgcgcctataataccaattttcatttttcatttcctccttatttgtaacaattttagttacatgttagcggtgagaagtcatcccttttgattaaaagagatgattcataacatcttttaatgacttgcttgccagttcattttccatcgctctttgcacactttcaaacgtttcatccagagcgttctgaatttttttccctaccggacatttcggattcgggttttcatgaaccgcaaagagttcttcttgcttttggacagcccggtacacttctaaaagagaaatatcagcaggatcttttttgaggcttgcacccggcaccccggcgcgtgatgtgagaatatcagcttttttcagcaggctgatcattcttcgcacaactaccggattcgtgttgacactgtctgcaatgatttctgaagatgttttttcatccatcgagatgagggataaaatatgaatggcaacagcaagacggctgttaatcatgttttttcaccaccgttgtaactataatagttacatttgattcgtttgtcaacatctaatatacactaaatacatgggttttgtgcaccgtttttagtcaatagaacggccggatgcactccggccgcgtcttatcaaaataagaaatatctttgtccaagtgggacataatcgacaggctggcaagacaattcctccccgtcagcaaagacctgataggtttttggatcaatctcaatcttcggcaaagccgaattcagcttcatatccagcttgctcagctttctgatatttttgactggagaaatccttttttccagccctaagctttccgccacaccacgctctatgcttgcctgagacataaatgtaatcgaggttgagcggttggcttttccgtaagacgcatacatttggcgcatgaaaaccggttcaggagtcgggatggacgcgttcggatctcccatttgcgcacgtgcaatcatgccgccctttaagaccagttccggtttcacgccgaaaaataccgggtcccacagaacgagatcagcaagcttccctttttccaccgagccgacctcatggctgagcccgtgcgtaattgccggattaatcgtgtatttggcaatgtaccgttttgcgcgcacattgtcattcccgttttcaccggcaagagcgccgcgctgttttttcattttatcggctacctgccatgttcggatgatcacttcaccgacccgccccatcgcttgggaatccgatgatgtcatgctgatcgcacctatatcatggagaatatcctccgcggcaatcgtcgccgccctgattctggaatggctgaatgccacatcttcaggcactttcgcatctaaatggtggcagaccatcatcatgtcaagatgctcatccatcgtattaacggtataaggaatggttggcgttgtagatgacggcagaatgttcgcgtaagaggcgagcttcataatatccggagcgtgaccgccgcctgccccttcaatgtgataagtatgaataacccggtccccgatcgcgtcgagcgtgttttccaaaaagcccgcttcgttaatcgtatcggtatggatggcaacttgaatatcagcctcgtccacgacttccatacacgttttaatggcgcttggcgtcgttccccagtcttcatggagcttaagaccgatggcgcctgcttccacctgctcgatcagcggcgctttatcggatgcattcccttttcctaagaagccgacattgatcggaaactcctcggccgcttccagcatcctcgccatataccacgccccggacgtacatgttgtcgctttgcttcctgtagcgggtcctgttccgcctcccaaaagggtcgtcacacctgaagaaagcgcaacttccatctgctgaggacaaataaaatgaatgtgcgtgtccactcccccggctgttaaaattttgccttcaccggaaatcacctctgtccccgctccgatgaccatgtgcggatcgactccatccatgatatcaggatttccgctttttccgacaccgacaatccggccgtctttcacaccgacatccgctttgacaatgcctgtgtaatccaatagcacgacgttggtgataaccaaatccaaagcgccgtccttccctgtgattctgccgttttggcccatgccgtctcggatagtttttccgccgccaaagatcatttcttcaccgtatactgtgaaatccttttcgacttcgatccataaatccgtgtcgcccaatctgattttatcgcccgttgtcgggccaaacagttccgcatattcctcccgtgacattttcatcggattacaccctccatccagccggcttgttttaagttggccaacgttttttctttgccgcgttcatcgataaacgtgtcggccattccgttcagccctctaattgtcttgcgtcctctgatttccactagtgagaccgttttctgctctcccggctcaaaacggaccgacgtgcctgatggaacatcaagacgcatgccgatcgccagctcacggtcaaataataaagccccgttggcctccgcaaaatgaaaatgcgaaccgacttgaatggagcgtgatccggtgttttttaccgttacctcccgtatctcacggccttcattaatcgtaatggttccctcagcaatttgaaatgctcccggcttcatgacttcacctccgcagaaattggctgatgtaccgtaacaagctttacaccatccggaaatgtggcctccacctgaatgctgtccagcatctcaggcacaccctccatcacatctttttccgttaatacatggcggccggcttccatcagctctgctactcccttcccatcacgtgcgccttccataataaagcaggtgatataagcagcagcctcaggatagttcagcagaacgccccgcgcctttcgctgtttggctaattcccccgctgcaaaaatgagcaatttctcttgttcaactggtgtcagtttcatctgtagtcctccttcttttgtcatataaagcagatgcggctactacgaatttgcggaacagtcaggcgggacatcacctccctttcttcgagaatgggggtcatacggtaagatgcctttcaaagcggcatgccgtttcttcatcagccttgccatggtcaacaaccgttcccctgtcgatcacggaaagatcagattaacgcgttttccagactgcgctcgactaagataacaaatgtctttttttctggaaatttctataataacttgtctgactagttcgacaattaaaatctgaattccttccaattgtttattaagtaaaatatttttcagatttaccatcagcgctctggtgattgcaagctgctgctgttgaccgccttttcgttttgaacaaacgtttgattaaaacaaatagccccctctgtttagccggagtcggcctaatacagcgacaatctgccccgggcgaagctaaggctgtgcaaaaccatcgattgatcataaccagacgttacattcctgatggcagcccgttgttttgctccgcaaccggaagcatggcatggaggccagtctgaggcgccgacctccacgataccgagaacccgactattgccattaactccgcatcatggacggtcacttcgctgatcgccaccgttcctcttaatgagtgaagaattccggccttcactgaatccccgcttgtgtcgatatcaactgttttctcgcactcccgtggcttccgacactttcttcggtgcagtacattccgtcatcaaaacccctttgtttgatttcttcaaatgatgttataaaagtttacaacttatgtcatcattatatagaagaggcctattaattcaaagaatatttaaaaaatttagttaccttgaccaaatcagcttctttttttgttatatttattcacatcagaaaaagcgaaaaaaaaaagacaagaaacatttcgtttcctgcctcttccgtacgattaatctttatctgaaaatttatccttggctttcccgatatccttttggatttcgccttttgccttatcttttttgccttcagcctgcatgtccgttctgtcagccatatctccgactttatccttcacttctcctttggctttattgaagccgcccttcattttgtcttttacactatcgttacccatgttaattctcccctctcaattatgtgtgtacttgttaacttcccgatctgagaggcaataaacattctaatgttatttatcgatttcgtagcgctctccgtaacggagcaccttgtatatcgccagcccgtctgatgactttttctccgaatatcggaccggcagcagggcaaaaaacacataatacgtagaaaaatagacaaactgatagaaaaacacattcggctttaatacactgtgtataatcagcagattgattgcaaaaatcgtgatgaggttaaacaagcagccccctgcatacacgagtgcatttgagaatcgattgtcaattttcaactccccgtaccggcaaaaagaatcgataaaataaatcgttctgaaccgtatgggtccaattttaagcagcgtttttcccatgcctatatccaacgatccctttccgccaaaaataaaagccataaagctgtgccctgaaacatgtataatctgtacaagcggcagaacaatgaggaaagaccacagaaacttcaccatatcattaaaaccaaacattgaattccccctcacatgcatatctgcatcccaaaacggcttttgttcaaaaaacagtgctgtagcgatttttcctgttctccccggaaataaacgttccgatgctcccctttttttgcataaaaaaaaaccatctgccagcagatggttttgtctcatacttcatataaacaatcgttcctttgaatcatctctctcatgctgaccgctttttcataaaaatacaccgcttctttatattgttcgcgatgactgaaataagaggcagcatctaaagcaaattcttcaatatatacatacaggcccttttcttccatataatcaaatacttcttgaatcatattcaaattgacagattccacatataatgcctgcagaaatttatattttgccagactgaagaagtcgtttcgtttttgggcaatggcaatccctttttcatagtaccgtatcgcggcttcgctatcttgttttttgaaaagaacgcgagtcaggctgaagagcgcttttggaagctgttccagctgataatcctcgaagacaggaagcgctttttcaaagtattcggcggcctgatccagctcccccttgtcatcatagcaattaccaatattataaagggctgatccgatcaaacggggctgtccttccaataaagcaaggcgatacgcgtcatctaaatgttcaagcgctttttcataatttctgtagtcaatgtagtttcctgatatgacgaaatggcattgaattcttctgactctgtaaaaatcgtgagccttatacgtctccagcgcctgtacggcatggttcatggaaaagtgcgtctgcttcataatataaaagacttccgccactttaaaatgaaattccgctctttcaatttcatcttctacaaacgcaagcatcttctcagctttccgataaaaggatatagccgagatgtaattgttctgttcaaattcgtacattcctctaaacaagtgaaaataatactcagataatccggagatgctgtcctgattgctttccagcgttttgatcaattcacgatattgaagctgagattcctcgtgcaggtcaggctttacataatccagcataatttggtgccggtagctgatcagctgataatacaggagaagcagctgatcctcttccatctgttcgatatctagatcaatttcttctttcagttttacggcatcagccacttgaaatgctaaaatgtgcttataccacttattgattttcactcctacttgagatgacgggatctcgtacgcggccatgcccctccaaccctttctattttctaattggttatattttatcataatgtatggctttggaattaaattttcttacaatgattccttctttatgcctatccttatatatttcggtttttctacgtattttttgcactcggattctaataaaaaagcttaccggacagtgccgataagcttttgacttcaaattaaccgccaatataagacatttccactttctttttgccagatgcttttgatagcgtacgatcgactgaatactgatcgatccgatttttccatactgtcccgatcatttctgatagttcgtcatcacttaattcctggcgaaccggagctctgaggtcaaatccgcttgaagcgaataagcaggtaaacagctctcctctcgcagaaagacgggctctgttgcaagatccgcagaatgcatcagatacagatgatatgacgccaatttctccggagccgtccaagtagcggaatctggaagccacttcgcctatataattaggcgctatcggctcaaccggcatgtgtttattgatcaaatctatgatttccgcctttgtcatgacgtctttcttttcccattggttggtgttgcctacgtccataaattcaatgaatctcaggatatgccctttttctttaaaataacgggccataggcagtatatctttttcattgacgcccttttgaacgaccatattgattttaacaccgagccccgcttgcttcgccgcttcaatgccttccagcaccttgctgacagaaacaccgcgcccgtttatcttcttaaaacgctcgtcttctaaagaatcaaggctgatcgtaacccttttcagcccagcctccttgagcctcttagcataaacaggcagcagtgatccgtttgtcgtcatcgcgatgtcacgaatacccggtatgcgggccagttttttgattaattccggcatatcctttctcatgaggggctctccgccggtcaagcggattttttcaacgccaaatcttgtgacaaacaatgtcgcaagccgttccagctcctcaaatgaaagcagctcctctttctttaaaaaaggataatccgggccgaataattcggcgggcatacagtacgtgcatcggaagttgcagcggtctgtaacagaaatgcgaaggtctctcagcggtctgtttcttttatccaacatctgacgcgactctgtaatcatagctacagccccttcctactccctgattctctcagggtgtgtatatacattaaatgatccgtttctgacaaatccaatcgctgtgatattcaattcttcagccatttgaatcgcaagctccgtcggggccgatttggaaatgacaatcgacacgccgattttggccgcttttaacaggacctctgatgagattctgccgctgaacacaatcagtttgtcgcgtacggacatcccgtttagaaggcagtgtccgtatagtttatcaagtgcgttgtgccgaccgatatctgtgcgcatcaacagaagcttctctgtgtcgcaaagcgccgcattatggacgcctcccgtatcctgaaacgtcccgctcccttgctgcatgtctttcataagcgccagacatgcctcaggcgatatcttgatttggctgacagccgtcttggctgttttgacatcctgctgaaaataaaaatgacggccctttccgcagcatgagccgatcacccgtttcgtataatccttttgatccaatgtctcagggtgaacgaggtcgacatatacaaaaccgagactttcatctattgtaaaccttttaatttctttttgaaatcgtataacaccctctgatgcgagaaatccgatgacaagctcttcgatatgctcaggcgtacaaacgagcgtcacaaattcactgccattcagtatcactgtcaaagggaattccgtcaccatccggtcttctactttgcttatttccccttgttcatagcgccatacatccctgaccgcagttactttatcgttcaatgtctcttcccctccgcaatgttcctgcctttatattttttcacactcctcggattttgtcgaattctgagacacaaaaagagccctctatataaagggcttttacaggatgtgatgacggcggtgtttaggcaggacgcctaagcatttagccgccgttccttttataacacgtgagcaccaatgtgcattgacaacgaacgcggggtttgtcgacacgctgagacacctctgtataaaggactctatgtttgattatgctgattctttttcagaaccgtaaacagcacaatagctgcgatcaaggtgagaatgctgacaaaaaagaaggctgccagttttagaagaacaccaagcaatataaatgcaacggtggctataagaaaaatcattccgaataatttcatatgttcaacccctttttagggtatcattcccgcccaaactgtttttaaaccaataaaaaaggcgcctgggggagcgcctgatctttaggttccttactcagtaaatttttgtgcttctttttcccaagcctgttcgaactcatccgcactgttcgctgaaatatattctccgccgccagcgacagctgcttgtttcatctcttcattacccttgacatcaaagttgaagccaatgatgtttacaatcgtatccacatttgatgcacggagcttttcgatttccgccgcagggtctccgccgcacgtttcttcaccgtcagtgattaaatacaccacgtttttcccgtctgcgtcaaatgcttcaaattcttttcttgtgtctgcaagtgctttggcaatcggtgtccatccagtcggcttgagctcactcaatgaattgtcaaacagagacccttcatatggatgaaggccgtaaatggtttccgtcgtactgcacgaaagggctttaccggacagtttattgttccctgcatgcccgaaaacgcgaagcataagatttgtatcctttggaagaagttcggcaaaagattttactgattttttggcaatgtctattttgcgctctcctcctgttttttgaaccatgcttccgcttccgtcaaacaaaacagctacatttgtatcagcctgtttctcagcggcaaaagacggggaggcaatggaaacagtcaacaatccaatgataccggcagccagcaattttttcatatgattacttcctttctttttcatattttccaactatatgttggattcttctttatgctagaatacgaaaatgcaaaaagatataggacatgctgccttttgtgctgctttcacgatctgtccaaaatcgcttgaaatgccgttcatttttagccatttccgcccagaaagcataaacagcttgtgtgatcattcattcttttttcgccttgattatgacagaaaaacggaaatctgctactatgctacaggcagacagctaattagttttgaagtttttgttacatacaaaaagaggctgaccatcaccagcctcttttttcttatttagataacattagtgattgctgagtgaaaattttctcaacatctttttgggtataagccgggaagtattcaccgccgcctactttcgcaattgcgttcagctggcctttgtatccctctttataatcaaagccgatcacattaacagtgatattgtctttttgcagttcctttgctgttttaatcgggtttcctccgcacgtttcctcaccgtctgtcaacagatacaccactttttccccttttgcatcaagctggtcaaaagaagatttcgcctcgttcagcgctttggcaattggcgtccagccagtcggcccaattgtattgagagaattgaggaagctttgctcgttaaagctttggaagccgtatacgttgcgaatggcttcacatgactgaacttttccggaatttttattgtttccttcagagccaaacacgctcattttcacctgagttccttctggcaatgagctcgcaaactttgaaatttcttttttggctgaattaaatttagatacaccatctattcttttcgccatacttccgctggcatcaagcaagaccgccacgttcgccggcgctttagcctccgtttctgtcttttcagctgcaaaagcaggtgaagttaatccaaaaagcaatcctgtcatcatgatcagtgaaaatcttttcttcatgttcgtacccctttaccaatttgtttctgcgtgcagatgttcaacgctgaacataatctatcgtaatcaacaaaaaccgagaaataaatagggcgggcttccccattgctgttgtttacttttgcatagaaacctatgtttttattagtgatttccacctaacgcccctatgaaaagagaagattgtccgcctttcggctttcgttatatgagtctgtcgaagtctgtcgacaaatgtggatgactttaccacaatctcaaagcctgaaatcaggaaaaaaggactgatccttaaagacggtcagaagctcctctaaaccgtttcagctactcttagataaaagatattcaggaacagaaaaagacgcccaatgagcgtctttttctactttttcgccatatatttattcaaaaacgcatctgcctcagaaatttgtgtgccttggtaatagtactttacaatgtcatcaaccgttttgccttctttggccataaaattcgctccgtattggctcatccccacaccgtggccaaatcctctcgtcgtgactgtaattgtgtctccatttcgcttccattcaaaatcggcggagttgagacccaacttttcacgtatgtctcttcctttcagcgtcttgccgttaatgacggcagttgcgacctggtggcccggtgtctcgccggtaatcttccctactgcgctagatccatccagcttgacgccaagcttttgctgaaattctgccgctgtaaaggttttcgttgccttatatttcggagactttttatcccatgggcttttgacgctttttaaatatgggatagcacttgtccaataagcttctgcattctctgtgtagccgttgcttgtggagaaaaaggatgcttcaatcggctggttgttgtacgttaagattttgccttgcgtactggctaccgcatctgtgattttcttcagttttgtctcatagcttgtgccccactgttttttcagctccgctttgcttttatacacctggaacatctgtgtatcatccaccagtgagcctttaggagcttctaccgctgaatttgacaccatcagtctgacaataaatgttctggcggcaagcgcctgggctttcagcgcttcaggtttaaaggttgccggcatttcggaggcgacgactccaatcacatactcttcaagcggaatgttttctacggattgatttgcggttcgatagacgggaatagaaacaggtgatgctttcaatgtttctgctcctttcgatgctggtttcgtgctgactgctgtcttttctgattctacgctggcccccgcttccttattatgctggaatggtataaccaagagtgtgggaaccaagagaatcaatgcacatagtacggatagtgtgattgcgaattgtttcatattcagctgcctcctgctcgggattcgactctagtctagtctatgggcagggacaagctaatatgactctcgttttggacagaaactttatttgtcatttacgtattcttttttgctattttgcgcataatgatgataatacacaaaaaataaaaaaccagtatgccagagtgacatactgattttcaagtaagtttatgcatttaagtcagaaacgacttctttattctcttgctcagaagcagactcatcatttacacgttcgatgtctgcgcccagagcggcaagcttctgatggaaatcaacgtaaccgcggtctaagtgcttcaattcagtaacacgtgtgtgaccttcagccactaaccccgcaagaatcagcgctgcacctgcacgcaaatcagtcgctgcaacttcagctccctgaagctgtacaggaccgttaatgatgacagaacgtccttcaatcttgatatcaccattcatacggcggaattcttccgcatgcataaaacggttttcaaaaacggtttctgtaatcatgcttgtgccgcttgcacgaagcagaagcgccatcatttgtgactgcatatcagtcgggaagcccgggtgaggcattgttttgatgtcaatcggtttaagctctttcgggccgatgacacgcagaccttcaccttcatccttaattgttacacccatctcttccatttttgcaattaaagaggtgaggtgctcaggaaccgctccttttactaatacgtttccttcagtgattgcagcagcaaccataaatgtgcccgcttcaatacggtcaggaataatatggtgttttacgccgtgaagcttttcgactccttcaattttgatggtgccggtgccagctccgcggatttttccgcccatgccgttgatatagtttgctaaatcaacgatttcgggttcttttgccacgttttccagcgttgttgttccttcagctagagcggctgccataatcaggttctctgtagctcctacacttgggaagtccagataaatttttgcgccttgcagtcggccttttacttcagcttcaatgaagccattaccgactttgatttctgcgcccattgcttcaaaaccttttaaatgctgatcaatcggtctggaaccaattgcgcatccgcccggaagtgcaactcttgcatgacctgtacgcgcaagaagcggccccatgacaagcacagacgcacgcattttacgaacatattcaaaaggtgcttcagtttgcaaagcgtatgaagcatttacagtcacttcattattttcaaaatgcacatctgctcctaaatgacgcaacacttcgttaattgtatatacatcggagagcgtaggtacatcacaaattacgcttttttcttcacttgctaataaagatgcagcgataacaggtaaaacggcatttttagcgccttcaactttgactgtgccgtttaacttctgaccgccgcggacgatgattttttccaaggtattcccctccgcgtccctaaattctctatattaatattcagtcgtaacgattggtgtgccaaccgtaacggtatgttttccgcccattcctgcacttctaagtgcaatttgcaaattcattttatgtttcgaggtcataatgtactcttcccactcatctgtaaacgcagaaatagaaacgaaatttggctcaactacatgttctactgatcttgcttgaaattcatttaataactgatttgcttttttttgcaaaacaatattcatattatcatctaagtgaccatttagacaagtaaaaataactactttttcttggaatatcccaagtgtctcccgttcaaactgttcatatgtatcattccagctatccggtgtctctagactcatttgctcatataataaatacgaagttggattgtgttttttgagggttgtgacaagctgcagtctaaaagaagtacgattttttttgtcagtatatgtgccaattgcctttatcattttatcttcccgtgcaatcacccaatcatattgacgatactcttgttttaaacgttgcactttttgataaaattctttttcggtcagtgacaagttttgttttgcatgcaatgtccacttatctattgacacatcttgacgttccatcccctctgccatctgtgctaacggcgttaattcactcgcatgaatggtatggaaaacagcaatgacgaagcttaacatgacggaaatgataatagcgtggcttacttgttttttcttcatgttcatctctcccccttatccccagttttaccggaggcaagaggcgccatacgtaaaaatcttcgtcaaaactcgagctattcgcttcaacccgcttctcccaaccatttaataatgttcaaaacctattaaaatagatagggaagctgctgtgaataattgaggtaatctaaaaagaaattggcaacggccgttccaatggcgattgtcagcaaaatcatcaggagtcttgcctgcacgactttgccttttttgattaacggatctatattgacggcttgcaacgcccaccaagtcactgctataaaaatcaggtgaacgacaatgccgattgcagcctgctgtcccaatacactcatctattacactcctttctctgcgttcataccctttcttattatataagaagcacagataaagatgatacattttatacagaacggaataatcagccaaatctagggctaatccccgcttaaagtgcgattcttttacatggtatactttattggaaaggagctggcaaatgtgaatcattctttttttcagcctgaaaagcaatatggtgaggacctgccaatttttgatcaggaatgggaagcaattgcattctattatgattatagacagtcacagattgaagaactgaatgaattgtgtcagttttttaacatttctcttacctatacgagagaaagccttgaagagcttgaaaacctctattttcaaagtatacaagaacttttgcttgctgattggaatcttcctattgaagaattcgagaaaatgatcagtgtttatcttatagattgtgtgattgcccgccatgaagatgctgaatgggttgtaaaaccttatccctataaagacggcgcttatacacttggctttagaagacatcgcaaatcgtggcatacaatgaatgcctgtgatggtttatacctgcgtccaaaagaggatcgcccgttgctgtcgctgtttgattctcttgtgcgttcataaaaaaatccttctcataaagagaaggattttttcttatttccctgctacatccaatctgttcaaagcccgctgtaacgcaagctcagcccgacgaatgtcagtatcatctgattgagaattcaaacgctcctgcgcccgctggcgtgcagcttcagcgcgctctttatcgatgccttccgctgtctcggcagcctgggcaaggatggtgacatgatcaggacggacttctacaaaaccgccgctgacggcaaccatttcagtctgcccgtcttttttcagacggacagcgccgattttaagaggagccacggttggaatatggcctggcaaaataccgagatcgccgctttcggctctcacactcaccatttcgatatccgcatcgtatactgggccgtcgggagtaacgatattgactttaacggtcttcatgcttttaccctcctaggaccagattaaacttctacacccatttcttttgctttctcaacaacttcttcgatacggcctacaagacggaatgcatcttctggaagatggtcatatttaccggctaagatttctttgaagccttgtaccgtctcttttacaggcacgtaagaacctttttgtccagtgaactgttcagccacgtggaagttctgagaaaggaagaactggatacgacgtgcgcggtgaacgacaagtttgtcttcctcgcctaattcatccataccgagaatcgcaatgatatcctgaagctctttgtaacgctgaagcgttgactgtacttcacgcgcaaccgcatagtgctcttctccaacaatttcaggagcaagggcgcgtgatgtagatgccaacggatcaaccgcagggtaaatacccatttcagttaatttacgctcaaggtttgttgtcgcatccaagtgagcgaacgttgtcgccggcgccgggtcagtgtagtcatcggcaggcacgtagatcgcctggatagatgtaactgatccaacgttcgtagacgtgatacgctcttggagctgacccatctcagttgcaagcgtcggctgataaccaaccgctgaaggcatacggccaagaagggctgaaacctctgaacccgcttgtgtgaaacggaaaatgttatcgatgaagaacagtacgtcctgtccttgtacatcacggaagtgctcagccattgtaaggcctgtcaaagcaacacgcatacgtgcgcccggcggctcgttcatttgtccgaataccatggctgttttgttgattacgccagagtcactcatttcgtagaaaaggtcgttcccttcacgagtacgctctcctacgccggcgaatacagagataccgccgtgctcttgcgcgatgttgttgattaattcctggattaatacggttttacctacaccggcaccaccgaacaatccgattttaccgcccttaatgtaaggagcaagcaaatcaacaactttaatacctgtttcaagaatttcaacttctgttgaaagctgatcgaatgaaggcgcctgtctgtgaatcggatcctttttcgcatccgcaggaaccggctcattcaaatcaatattttctccgagaacgttaaatacacgtccaagtgttacatcaccaaccggtactgagattggcgctcctgtatctacagcttccataccgcgctgaacaccatctgtagatgccattgcgattgtacggactgtatcatcacctaaatgaagagcgacctcaagcgttaaatcaatacctacttcgttttcacttgcagctggctgtgaaattttaatcgcattataaatttcaggcaagtgaccgtcttcaaaacgcacgtcgacgaccggtcctaatacctggctaacgcgtcctttcttcatcgctatccctcctgacaaaatctttctattctaaagcggctgctccgccgacaatttccgtaatttcttgtgtgatggctgcttggcgagcgcggttgtaagaaagcgaaagtgaatcgataagttccttcgcgttgtctgtcgcgtttttcatcgccgtcattcttgcagcgtgctcacttgctttactgtcaagaagcgcaccgaagattaagctttctgcatattgaggaagcaaaacctccagaacctcctcttcagatggttcaaattcataagacgccgttctttttccgccgccgctgcccaaatcagataacggcagaagttttttctccgttacttcttgagtaatggcgctgacaaaatggttataaacaaggtgcaattcatcaaacgcaccgtctataaacatttgaatcgtttgacgggcaagatctttaatttctgtaaacgttacttcatctccaagtcctgttaactcggaaatgatcggaatctcccgtttcttaaagaaatcacggcccactcttccgatggcaatcaccgcatactcatccttagactgatgacgttcttgcatggcctgataagcactccgtaaaaccgaactgttaaaagcgccggcaagaccgcggtcagacgtaatgacaaggtatgccgtttttttcacttctctgctgagaagcatcgggtgcttcacgttgccggaaactcttccgacgtttgacacaacctcttggattttatccatatatggcacaaatgattttgcattgttttcagcacgattcagcttagccgcagataccatctgcatggcttttgtaatctgacttgtttttttcgttgacgtgatccttgacttaatatcgcgtaatgaggccaaagatttcaccaccttttctcttcatctgcgtaaaaagagagaaaaagagaacctttttctctcatcagcattcgagttagttgcttggtgcaaatgtgcgtttgaagccttcgattgcagctttgaagtcttcatcagcaggaaggtttcctgttttcgcaattccgtcaagcaggtctttatggttttggtcaaggtacatgtagtactcttcttcaaaacgtctgatatccgccacaggaatatcatcgagatatccttttgtcagcgcataaagaatagctacttgcttttcaaccggaagcggcttgttcagatcctgcttcagcacttcaactgtacgcgcaccgcggttcagttttgcctgagtcgcttggtcgaggtcagaaccgaattgagcgaatgcttccagctcacggtatgacgcaaggtcaagacgcaaagtacctgatacttttttcatcgctttgatttgcgctgagccgccgacacgggatacagacaatccggcattgatcgctggacgtacgcctgagaagaacaaatcagattgcaggaagatctgtccgtcggtgatggaaatgacgttcgtcggaatataagcagagatatctccggcttgtgtttctacgaacggcagagctgtaattgatcctgcgcctttcgcgtcgctaagctttgctgcacgctcaagcagacgggaatgaagatagaatacatccccagggaacgcttcacggcctggcggacggcgaagaagcaaggacagctcacggtaagcggccgcttgtttagaaagatcatcgtatacaacaagaacgtgcttgccgttgtacataaattcttctgccattgtaaccccagcatacggtgccaggtacagaagcggtgccggctgtgacgcagacgccgttacaacaattgtataatcaagcgcgccgtgtttacgcaatgtttctactacgccgcggactgttgattctttttggccgatcgcaacatatacacagatcatgtcttggtctttttggttcaggatcgcatcgatcgcaacagatgttttacctgtttgacggtcaccgatgatcagctcacgctggccgcggccgattggaatcagtgcatcgatcgctttgataccggtttgaagcggttcatgaacggatttacggtccataacgcctggtgcagggctttcgatcggacgagttttgcttgtcagaatcgggcctagtccgtcaaccggctggcctagcgggtttacaatacggccgattaactcttcaccaacaggaacctccatgatgcggcctgttctttttacttcgtctccctcacggatctcactgaaaggtcctaagatgacgatacctacgtttgattcctcaaggttttgagccatacccaaaacaccgtttgaaaattcgacaagttcaccggccatacagttgtcaaggccgtgcacacgtgcaataccgtcaccgacttggatgactgtacctacgtcttgaacttcaatatcagattgataattttgtatttgctgttttatcagcgtgctaatctcttcagctttgatgctcacttaggtttcaccccttctatcgattttccccggctaattgacgttcaatgcgctgaagcttcccgcttacgctgccgtcataaatccggtttccaatgcggactttaataccgcctattaaatccgtctgcacttcatttctgattctcagtgaagcgactccggctttttttgcaaacacttgtgataatggtaacatttctgcatccgtcagcggtttcactgaatatacgattgcgtcttctgtttgacgggccacatttgcgagtttgataaactcatctgtgagctcagggacaatcgcggcacgatggcggtcaatcaaaagaaaaatcgtattgagtacggactgtgacaaagagccaaatgcattttgaatcagctcttttttcttcgcagccggcaccttcggatggttcaacacatcattaagcgctttttcattttgaaatacttgttttacaacaattagctcttcttctacttgattcagctgagcggactcattggctatatcaaaaagagctgatgcatatcgtttagagacagctgatccactcatcggctttctcctacctctttaagatagtcctggatcaatttctcttgcgcttgttcatccagttctttttcgatcactttcgacgcaatcatgacagaaagagacgctacttgctcacggagagcagaaaccgcctgttccttttccttcacgatttcagttcttgctgcttctttcagacgttcagattctgcacgtgcagcctgaataatctcttctttttgcttctctcccagtttctttgcgttttcgataagagtttgggattcctgtcttgcttcttttaaaagaacgcgctgctcttcaatcagctgctgcgcttctttatttttttcttcagcagacgtaatttctccagcgatgtggtcttcacgctgtttcattatgtttaatagcggccctaaagcgtatttcttcagaagcgctaataagattaacatagctaacagttggaacaggatatctccgccgttaaacgacaatcctagttcaagtggtaattgagacatctactacggcaactcccttctgcaggtttttctttgctgatccagcagccgcacttgtctcttttcagccggcaaggcgggatgcttatcagacataaagcaatggcgaaggttctcttggaatgatcttcgccatttttagttcatataaggcttttatgcttagccaaagaacgctaagaatgcgataacgacagcgataataggaagggcttcaactaatgcgatacccatgaacataagagttctcagttctttacctgcttccggctgacgggcaatcccctctaccgtacgtgaaacaatcaaaccgttaccaatacctgcaccaagtgcgcctaaaccaattgcaatcgcagctgctattaaattcatgaaaaagttcctcctttaaaatgttatccgtttggatataatgttttaatgatcatgactgattttatgagacatgtacaccatcgtcagcattgtaaagataaatgcctggatagcaccaataaataaactgaatgcttgccatgccagcatcggcagaatggcaccgattgtaccgacaagaccgagagccacgctttgcgaataatggcttgttgctaatcccgcaagcaggccgagaagaatctcaccggcgaagatgttaccatacagccgcaaacctagagtcagcgtattcgcaaactcttcgatgattttcatcgggagcatgaatggaacaggtcttaaatagtctttggaatattccttgagccctttcatcttcacaccatagtagtgggttaaagcaacaaccatcacggctagcgttaatgtaatggcaggatcggctgtcggagacttccaccagagctcatgtccgattgtaatagagaacggcagccccagcatattcgacacaaatatgtacatcagcaatgtgacaccaagtgccaagaagttagcccctgtttttaaatccattgtactgccaataatattgcggacgaaatcaacaatccattccataaagttctgggcttttccgggacggatcgaaagcgttcttgtcgtcaatatagcaatcaataaaacaatcacactcgccacagtaatcatcagaatgtttgtcagattaaaagtaagacctagaaattctatagttctgtaaccatgattcaaagggttttcacctctcttccattgatgaacgtttaagctggataaaggaatctatcataatgacagggtatattgtcattaatccaataactgtacttgccatatgaaagtattcgggatttttataggcaacagccacagcaagaatcgcattgcaccaccgcgctgcgctcccgagagatcgtatggactttcctttctctacagctctgtcaaaagcattcattcttctgacgagcagtaaaaaattaaacaaactgaaaacagttcccagaataaggcctaaaaaaacggttttatacgctgttaaaccataacccagtacatacactgccaaaatgaacaataaatatttgcgttgtctgctaaatgtaagcttgggatcgtccatcaattatctgtctcctgatgaaaaaataatgtatagcttggatacggcaaaaatcagcggttaacccttagtagaagaccttttttgaccggcaaaacgggcctgttcgaaaaaatcattcatccgcaagccttgcagggatgctgtttcattcgcttaaataaatcctcataatacgggtttgctgagaggatttacattgaggatgaggactataatgaaagctatgaaaaccttctcataataccctcgtttagcatacaatagcccctaacatgtgtcaatctgtttaaagttaaaaaactttttatactttacgtctccacagaatgttcacattttcacctataattgtatacagattcaccgaatagcaaaaaactggataaaaaaatgaaacccccttttggggatttcattttttattttgttccaaacatgcggtcacccgcatctccgagacctggaacaatatatcctttttcatttaatttttcatctagcgccgcaatgtaaatatcaacgtccgaatgatgcttctgcaattcttccacaccctccggcgctgctacaagacacatgaaacggatatttttcgcaccgcgttttttaaggctgtgaatggcttcaactgcggaaccgcctgtagcgagcatcgggtcaaccacgatgaattcacgctcttccacatcagaaggaagcttgacatagtattccacgggttttaaggtttctggatcacggtaaaggccgacatgtcccacttttgccgcaggaatcagctttaaaatgccgtcaaccattcccaatcctgctctgaggataggaaccactccgagttttttccctgagatgactttcgatttcgcagcctgaaccggtgtattgatatccacttcttccagaggaagatcgcgggtaatttcaaatgccatgagtgtagccacttcatctactaactctctaaaatccttcgtacctgtattttcattccgtatatatgtcagcttgtgctgaattaaaggatgatcaaatacataaacctttcccatactgtgtttcagctccttttttattgtcccatcaacaattacacacttctattgattctacaaaaaaagacattgagtttcaagaacatcgtcaaaaaacccgccgggcataagcccaagcgggttttaggatcttaataatctaattctttatataaaggaaatttatcagtcagagcagctacacgctgtcttgcttcttcaagttttccttcatcttcgtggtttttcaatgcaagcgcaatgatagcaccgacttcttctaatgcgtctccgtcaaaaccgcggctggttacagcagctgtaccaagacggatgccgcttgttacgaaaggtttttcaggatcatatggaatcgcgtttttgttagacgtaataccaatttcatcaagtacatgctccgcaaccttaccagtcagtccgagcgaacgaaggtcaacaaggataaggtggttgtctgttccgcctgaaacgagctggatgccctctttcgttaaggcttcagccagacgtttcgcgtttgaaatgacgttttgtgcatatgttttgaaatcgtcctgcaatacttcaccgaatgaaacagcttttgcggcaataacgtgcatcagagggccgccttgaattccagggaagatcgatttatcaattttcttgccaaactcttcacggcaaaggatcataccgccgcgaggaccgcgaagtgttttatgtgttgttgttgtaacgaaatcagcgtaaggaaccgggtttggatgaaggcctgccgcaacaagtcctgcgatatgtgccatatccaccatgaagtaagcgccgacttcatcagcaatttcacggaatttcttaaagtcgattgtacgaggatacgcacttgctcctgctacgataagcttcggtttatgagcgagggctttttcacgcacgtcatcgtaatcaatatattgagtttctttatctacgccgtactcaacaaagttatattgaacaccgctgaagttgactgggcttccgtgtgttaaatggccgccgtgggagaggttcatcccaagtacagtatcgccttgctccaaaatcgtgaagtacactgccatgtttgcttgtgcgcctgaatgaggctgaacgtttacatgctccgctccaaagatttccttcgcgcggtcacgggcgatatcttcaacgacatcgacgtgctcgcatccgccgtagtagcgtttgcccggatatccttctgcgtacttatttgtcaaaacagatccttgtgcttccataaccgcttcacttacaaagttctcagaagcaatcaattcgatcttagtctgttggcgttcacgctcatttttaatggcgttaaacacttgttcgtcttgcgcaggtaaatgtttcatcagcgagatcctctcctatccgtatcctgttctttgtttttaccatcactattgtacatggtttttaaggccgatgtaaaagattatttttaaaaaatctaaatttttattggtaaaaacgaatattaataacttaaatttaatttaaagttcggaatttatttcactatcttaaaataaaagaaaagactggctatgcagtcctttcattcgcactcataaaccgcccgcactccgccgattagtttcggccgtgtacgcgccaatgtcacatgagctgaaccgaggctgttttgagagacacgcacagggacagccaccggtttcagatgcatgccgataaacgtatcgcctatatcaattccggcgtcagcctgaatggtttcaacaagaacaggagacttcatctgcttaaacgcataagacgccatcgctccgcccgcttttggaacgggcacggcagaaacggttggaagcctgaacagcttggctgtttctgcttcgacgacaagcgctctgtttaaatgctcgcagcattgaaacgccagatggattcccgttttttcccggagctcagcaagtccgctgtagatgctttcagcgatatctacactgcccgatgtgccgatccggctgccggccacttcgctcgtgctgcatccaaggacgaagagctgatcttgtttcaattccgcttggtcctgaaactcagacagcatcgtcttccacgtttgtttcaactcattcattaaacagcacccctacaggtttttctcttcataatcggagatttttccaatacgcgtttggtgtcttcccccggtaaactcagtagtcagccagatttttgcgatttcccgagccaaaccaggtccgatcacccgttcacccatcgcaaggatgtttgtgtcattatgctccctcgtcgccttcgcgctgaaggtatcgtgcgccagcgcgcagcgaatcccttttactttattagcggaaatgctcatgccgatgcctgtcccgcaaattaaaatgcctctgtcaacttcgccgctaaccactttttcggccaccggaaaagcataatccggataatcgacagagccgctgccgcagtcacagcccatatcaatatattcaatttgcaattcgtccattaactctttgatttcatttcgaatgtgaacgccgccatgatccgatgcaatggctactttcatctgcttttcctcccagcgtgtgtgatgcggcccgcccgctttattgaccgcgcagcctgtccgctctttgattcacaccatatgatgtgcttttcactatattctactccttcacgcaggatttgcaaatgacctgtttgcagattttctgacaacttatctacggtcttttttcagctgttttgccagctgccgaagaagctcttcaagctcatctcgcgtttgtttatagatgtcaattgagccgccgaacggatcgaggacatcaccatggctgcctgtgacatattcttttaacgtaaacactttatcacgataacgtccaaattggctggcaatgatctgtttgtgctgatgggtcatagccagaaccaaatcagccgattccataagttcttcagttaatggagaagacacatgattaagggcaatgtgtttttcaaacagcgcttcgactgcatgaggcgtcgctttcccattaggtgaagcaaacacgcctgccgagcggacattgacattcagcccttccctttctgcaattgatttaaaaagcgcctcagccattgggctgcggcacgtatttccagtacagacaaaaataatatccatgtcagtcaccccttatttttctctattatatatgaagaaaaaagaaacggcgacttcgtttcttttattggtatattaaattggcaaaagcagctttaatccaaacacgattaatatgatgcccccgagcgcttcgctgtatgtgccaagccatgactgcacttgttttccgaccagcaggcccagccatgtcaacatcatgctgaacagcccgaacagggtaattgtgaggagcggatgcgagccgtatatccccaagctcaagccgacggaaaagctgtcaaggctgacgccgatggcaaacagcaataagcccggccctgccggtgacatgaatcgttcttctgactgtttaaaagaggccataagcatttgaaccccaagaacaaaaagcagcgccccaccgatataaaccgctaacacgccgaggagccctgacagcatgttaccggccgccatccctgcgagaggcatgatgacgtgaaagaggccgatgatgaaaccaatatagaatatctgcttctttctaagtttgaccatgcccattccaaggccgacagaaaaagcatccatccctaaagcaaacgccatgatgcttaatgtaatcagttcgcctataaacaaatccgacatacataaataacccccttggacacgccccgcttttttagcctatgcgtgtccaaaaagggttagaacatctgactgctttcagcgaatcactcttcctccggcggctttcatcagcctgttcataatagcaagaccgacacctgtatccggaaaggattccgctataatgaaatccaccttattctcatcaaagctgcgcaaagcatcatacagccctgccgcaacagtctcaagctgagcccgtcttccgcagctcttcacataatcagcggaataaacgcccgctttttcttctgtcgtcaggacaccgacccgtcttccaccctgttgatattcttgaatgaggtgctgaatgcgctctgggctgccttcgcaaatggcaagaggcgctgtcggcgcataatgtgtatatttcatccctggagaaatcggcttctcgttttggtcgctgagccctttatccacatggatcggcccgatcaccgcttcaatttgttccttcgtaatgccgccaggacgcaagagaacagggatgtcgtccgcacatgaaagcacagttgattcgaccccgattccggtagggcctccatccacaataccggctatgcggccatccaagtcgtgagccacatgctccgcttttgtgggacttggcttgcctgatagattggcgctcggtgctgcaatcggcagtcccgattcgcgaatcaatgcaagggcaagcggatgatccggcattctaatggcaaccgtttcaagacctgccgttacacgaggtgaaagcgcatcaggtttgcaaggcagaatgagcgtaagtgctcccggccaaaaccgtttcatcaatgttttcgccttttccggcgccgggcccgttaaatcctcaagctggctgatatccgcaatgtggacaatcaggggattatcgctcggccgccctttcgcctcatatatttttttgacggcatccgtattttttgcgtttgcgcctaggccatatactgtttctgtcggaaaggcaacgacctcattttctcggagcaaagcggctgcttgtgcaatttgtggatcatttgtggataactcgtcagttacatccacaaaccatcttttcgttttcatttctgaccaaactccttattcacaacaataaaacgattgttttacgcgtgtaatccttttgaaagtataaaagatgtcctgtaataaaacaagcgttatccacaaattgtggacaacgctaataaagaagtggataagtatgtgtataaactgcacttatccagacgcttttttcatcaaaacggctccttctgtttgccgcgattcacagaagtgatcagaagaaaacagctcctccggtacactctcagctctttcaaaacccatggccgtcagaaagtccgcagaggaatgctgatttgctactaggtacacggttttgatctgatgcttttcgcacagcacctccatgctttgaaaaagcgtgacgatgtggccttggtgaagcttgtccgatatgacaagtgatcgcagcagcccctggtcacagcttattttttcaataccgaggcatccggcaatgtttttctcactgtcctccagcataagaaattgagtgaagccttctttcacgccttcatagctggtttttgcctgttttaaaaatgcctcgagcacatctccgtctttttcccttgccacccgcagttgataaaacatccgttcaccccgtttttgcgttctttcttccaatctatgaggcaaatctatttttagaccagatgattaggaaaaaaggtcggaaatccattcgactaaaaagaatttcacttctgtgccgtcttctttttcttcgttctcttcttttttggctttttccgctttagcggttacgtcctcaagcactttttcagtctgcttttttgaggcttctttatcttcttgttctttgacggcttccccgttagaaaaatcaagaaagcagaggggcgggaacagcacacaccaccagttggcgccgtctccgtttccaagcgtaatcaaaatcgcttcatactcaccagcgggatataccatgttgccgtaaagctttgtcggaaacgagattttgtcaaaatcaacggatatcgactgattcgctccttctttctccattgtttcctttgcaattgctttgatttcaggcagctttgaacgaatcacgcgacgcgcttcttcaatagaagtaatatcctttacccaagttgtgatttctttattcaccgcgtctcttatatgacgttttaattgctggtcttgatcactatcgctgtttgccagtattctcaaacgaatcgcctgatcaggtatgaccaccggctgattttccgatttttgtgccgtctcttcttttgccagccctacgagcgctccggataataaaagaaagatatatatacaaatgattactgtttttttcatcggtccccaccgttcctctccgtgctttgtttctagccctattatggacaaggagagcctgggataaacgtgcagggtgaaaaaaatctagcaagctgttaatcttatttatggtacgatagtgttttaggaggtttaagatgaaatacaattatacagtgctgttatcagcattcacgatgtccgttctttattcagtaatttatattcattcatttatcattgccgctctcatcacaatggcattttattttctgtttccttatttgatcttcgcactgccgcttcaaatcatgatgaataaaaagccgaaacgtttcagccctttgtatctgctgtattaccttgccgctgcttttattgccaacgcgatcattttcggcatgcttcagccttcgggacaatctctgtttcaaaatacagccttttatcttttcgctgtattaacagctcttatctattggatatgggattctgttttactgcaaaaaaaggaagcctaagaggcttccttttttattaaaacaaaatcgtcagtaaataacatagaatggaaggtatcgccgcaacaaagaaagcggccgccattttcatgcgagatgtacggccttctttggtttctgaatggtagtttgcccgctgatcgcttccgcttacagccaaacccgatgtaatgatcgcgagccccactaaaacgagagacgcaacgccaaaaatcgcttcatatgaaagagcctgcggaaaaatggtgccaatcatgctctcaatcgcaatgagcaggattcctgctgtcagggcctttttcatgtttacatcccctttgctggtgttaaacagcttgatccattcactcgccagcaagctgcttatttatttttatgaatcagagcgcatatggttctgtcttttccattaatatctttcagcacttccacttccgcccccttaaacgccttgaggatcaggtctttgaccgccgctccctgtttccagccgatttcaaaaacgacaaatactttatccttcataacaagcggaatgtcttccataaaccgcttataaaatttcagcccgtctccgccatcggtgagtgcgtgcagcggctcatgaaaacggacaatttccgataaatcagccatttcttcctctgaaatatatggcgggtttgagacaatgatatccgctttttttcccgccttaataaaaggctcaagcagatcgccctgataaaagcgcacattcgctccgagtttttctgcattggcagaggcgacttgcagcgcctctttcgaaatatcgaccgccgacacagaaaagctttggttttcaagcgcaagcgtgacggctattgcgccgctccctgtaccaacgtcaacaacttcgagcttgccgtcttcagaaaaaacactccgatatttttcaagcaaatgaaagacaacttcttcagtttccggccgcgggatcagcacatcatcattcaccataaattcccgtccataaaaaaactcttttcctataatgtattgaaccggcacgccctctttatgcatctcaacgtgacgcttaaagcgatacagttcgtcttcaccaatcggttcctgtaagcttgcgagcagcttgcttctctccattccggtatcataaagcaataggagctcggccgcattttcttctcttcccgcttcggttaaataagaagaagcccatttcagggcttcgaatatcgtcttcatcttaaccttccgactgctgaagcttgcttgcctgatcttcaacaatcagcgcttcaaccacttcgtcaagttttccttcaagaatctgatcaagcttttgaatcgtcaaaccgattctgtgatccgtcacacggttttgcgggaagttgtatgtgcggatacgttcagagcggtcaccagatccgactgctgatttccgtgtttgatcatattcagcctgggcttcctgctgaaatttatcatagattctggcacggagaaccttcattgctttttctttgttcttaatttgagatttttcatcctggcatgatacaacaacacctgtcggcaagtgagtcagacgaaccgcagacattgttgtgttaacgctttgtccgcccggtccgcttgaagcaaatgtatcgacacggatatccttctcatggatgtcgacctctacctcttctgcctcaggaagacatgccactgttgcagtggatgtatggatgcgtccgcctgattctgtttccggaacacgctgtacgcggtgggcgccgttttcatatttgagtttagaatacgcgccgcttcctgtaatcataaagatgatctctttgtagccgcccgttccggttacattcgcttccatgacctctgttttccagccctgaagctcagcataacgggaatacattctgtacagattgcccgcgaataaagcggcttcctcgcctcccgcagccccgcggatctccatgataacgtttttgtcgtcattaggatctttcgggatcaggagcaccttcagccgttctgacagtgtttccgtttccttctgaagttcagaaatctcttccttcaccatgtcgcgcatctcagcatccagcttctcttcaagcatcgcttttgcatcagccagctgttctgacgcatctctgtattgtctatatacgtcaactgtttcttgtatatcagattgctcttttgaatattctcttagctttttcggatcgttgactacttctggatcgctcaaaagctcatttaatttctcgtatcgttcttcaattgattttaaacggtctaacacggtcttcacctctgttttcctgtgcgtaacattctcattatagtatagtgattaaccccagtcaaaagcatttcaatcccagctggaaaagctccctctgctatactggaattcgaggagggatgatgttgctgaaatccatacatcatattgcaatcatatgttcagattacgaaaagtcgaaagctttctacgtacataagcttggttttcaggtgattcaagaaacgtaccgcgaagagcgcggctcctataagcttgatttgtcgcttaacggctcgtatgtcattgagctgttctcgtttcccgatccgcccgaacgacaaacccggcctgaagccgcaggcctgcgccacctcgcctttacagtcggcagcttggataaagctgttcaagagcttcatgaaaaaggaatcgaaacagagccaatcagaacagatccgctgaccggcaagcgtttcaccttcttttttgatcctgaccagcttccattagaactgtatgaacaataacagtttttgaagaaaaaaaggagatacccactttctttgccgaatcttttcttgttttgtctaacgggaagggaaccgcattctatggtcgaatacctagcttaaaaggaggtatgggatcatgaatacaaatatggtagcaagtgaactcggcgtctccgcaaagacggtgcagcggtgggtgaagcagctgaatcttccggccgaacgcaatgagctcggacactattcgttcacggcagaagacgtgaaggttctaaaatccgttcaaaaacaaatctctgaaggcacggcgattcaggatattcatctgccgaaaagcgctaaaaagcgcacaggcttccttgtccaaaaaacaagtagcgacacagaacgaagaatcgagcagcttgaacaaaagctggacacccttttacagcaaaggcaggacgaaagcgaattgatggcaaggatgtcggaactggaacgccagctgaaacaaaaagccgatgaaggtgtatcttaccagctgcttcagcaccgcagagaaatcgatgatattcttgcagatctgcaatcactgacctcacaaatgaaagaattcaccgctcattcgatccccgagactgctgctgcttctgaaaaaaccaaaacaagaaaaaaaccgctgctgtcactgttcaaatttcaaacctaaagcaaaaagctcccttaaagggagctttttttgttacgcagtaagcgcgataatgattggaagtgaaatcaatgacagaatcgcactgaccacaaacgcagttgcagtttcttcttcttgtttctcgaaacgagtcgcaatcatggctgcaacggcagaaccagggaatgcaacaagaaggattgcttttgttgtttggtcagctggaagtccgatagcaagagcaatcaggaacattaacgcaggctgaaccgcaacttttagtaacgcaataccgatagccggcatactgagtttaattttacgaataccaacggtaacaccaacagcgaagagagcaacaccagatgttgtgcttccaagctgatcaagcattttaacacccagctcaggaagagtgaaattgaaaaccagcaccaagatcatactgattaacggagcagctgcaagcggctcacaaagaccatgcaggattgattttcctgtcatcttccagaagctgtcgccactctcttcgtttttcttagaagactcaccaacagtagcgataatgatcgcgagcggatcaagaatcgcgttaaccacgatacctgtgaccgcgatcggaatcgcaacttcattcgctccgaataagcttcccaataccgggatacccataaatgcgaatgtcggctgtgcagagttcaaagaaaatacagatgagttcgttaaatcatacttgaatataaatctgcaaaccaaaagaatgatgatatagaaaccaacaatcccaataattaaagaaatcattaaaggtacttgtgataaaaattcacttctggaagttgtcaaaataccagcgataaagtgagctggaagtgcgtatttcgttactaacgtacttaccccttttgccgacttggcatcataacttccaaaatgtcctgcaaaccaacccagcacgataacaaagaagatcggcgccaggaggattaagatatctaagatgctcaaaatattctcctccaaatcctatgtccgtatactttagctttacaaaaagctttccctcggacagaaaaatttactcgctaattatttcgcgatgacttttttgtattcaggtgtccacattgcatcaagtaccgcttgtttcacatcttcaggctgacgatttgccacgccgtctttaattgctgcttcagcaacggcaatcgcaacttggatagaaacctcttgaagcttatcaatgcttggaagcaatcctgctccaggtgtttcaagatcaaccatttcagcaatcgcatcagcagttgcagcaaacatagcaggtgtaatgatacgcgcttcagctacaattgaaccaagtccaagaccagggaacgcgaatgcgttgttagattgtccgatttcataagaaacaccgttgtattctacattgtcaaatgggcttcctgttgcaataagcacttttccgtcagtccatttgaacagatcttcaggaacagcttcagcaaggtgagtcgggttagacatcggcatgataaccggacggtctacgtgagatgccatttcttttacaatttcctctgtgaatgcacctgaaacccctgaagtaccaatcaagattgttggtttcgcttgacgaacaacttcatcgaatggaatttgacctttttcatcgcgcttccagtctttcacttcatccgcattgcgaaggtaaggtttttggaaatcaaggatgccttcgatgtcttcagtcagcaagcctctgtaatcaagtgtgtagaaacgtttgttagcttcttcttcagataatccggctagcaccattgtgtcacggatttggtcagcaataccgataccagcagaaccagcaccgaagataacaacacgctgatctttaatagaagcgccggttttcttcatagcggcaagcacacctgcaagtgtaatcgcgccagtaccttgaatatcatcattaaatgtcaggatttcatgattgtattttttcatgatgttgcgtgcatttttgttgccaaggtcttcccagtgaagaagcgctttagggaagaatttcaatgcagcttttacataagcgtcaatgaaagcttcgtagcgttcaccttgaacacgttcatgcttgttaccaatatataaaggatcgtttagaagtttttcgttgttcgtaccgacatcaagcacaaccgggataacacggctagggtcaataccagctgcagcagtgtagacagccaatttaccgattgcaatattaataccgcctacaccccagtcaccgataccgagaatgctttcggagtcagtagcaacgataagatcaatatcgcctgctgtcgcatgaaggttttcaaacgctttttcaataccgtcaatgttatcgattgacaagtagattccttgaggtcttctatattcatggctgtattcctgaatcgcttcaccaactgttggcgtgtacacaacaggaagcatttcgcgaagatggtttttcagcaatttatagaaaagaacttcgttacggtttgcaagatcacttaagtaaacattttgacgaaggcggtcaggctgcgcttggaattgctcgtacgcgcgttgtgcttgttgatcaagagaaagtacagttggcggcagaagcccttctaagccgagttcttgtctttcttctagtgaaaaagcaacgcctttatttaaagtaggaatagataaaacttcttttcctctaagagttgtttctaagtggccttctttcgttttttttatgttattcaagcaaatctccttctttcttgaaatagttaaccaagttaagtaataacccatctaaaatatgaccgatcatgatctttatgcgactttgtgacaattattcgaacaatgtctcaaaactatttacattacgtaagctattgtatgcctgtcaaaatcaaaattcaagagaagaaaattacttaattttttaatatacttatttaaattttttaattgaatattatcagaatataaaaaaaacaccggtgtttttagccggtgcattctatctttatacccatgttttggactattttttagatttacctgggacttcgtgatgatgtctgcatcttgcttcatatgattcagctgcaccaaccaaaatgaccggatcatcgtaagaagcaggtttgccgtcaatgaggcgctgtgttctgctcgccggtgatccgcaaacagaacagacggcttgcagctttgtcacactttccgcaatcgccatgatattcgggacgacaccgaacggctctcccctaaaatccatatcaaggcctgctgctatcacacggtagcctttatcggcaagagatgataaaacctcaacaatttcctgatcaaaaaactgcacttcatcaaccgcaaccacatctgtactttcactgatgtgatcccaaatgtccgcagcagacgaaatggcatagctcgtcatcgatgttccattatgggagacaacagcagcttcgctgtatcggttatcaattacaggcttaaataccctgacttcctgcttggcataagttgctctcttcactcttctgatcagctcttcagatttccccgagaacatgctgccgcaaatcagctcaagccacccgctttgtttcattatgtacataggcttcgctcccctctctctgccagctgtgttttagacaatataaaaaacaggcaagactgctgcttgcctgttgagaaatctattattacttaagaccgtattttttgttaaagcgatcaacacgaccatcagcagaagcgaatttttgacggccagtgtagaatgggtggcattcagagcaaatctcaacgcgtacctcttcttttactgagcctgtttcaaattcatttccgcaagcgcatttaactgttgcttttttgaaattaggatgaattcctgctttcattgtatccatctccttccgccctgaatcccgtgtggaaacagagttattatttcggagcattgtccgaaacgcatatgagaaaattatatcagtgatttacttcttttgcaaatacaatttaccttcttgcagatgatagatttgcctgtttccattcttgattgagaatatcgaaaaattcctggtttgttttggtttttttcatttttctcatgaacttttctgcgaaatcaggtgaatcagacatcgttttgcggatagaccataaacgatcaagatgctctttaggcacaagcagctcttctttgcgcgttcctgaacggcggatatcgatggcagggaagatgcggcgctcggcaagagagcggtcaagatggagctccatgttgcctgttcccttgaattcttcataaatgacatcatccatacgtgaacctgtatcgaccagagccgtagcaaggatggttaagctgccgccctcttcgatatttctcgcagccccaaagaagcgtttcggacggtggaacgccgctgggtcaatccccccggaaagcgttcttccacttggcggaatcactaagttgtaggcgcgggcaagacgtgtgatgctgtccatcaggataatgacgtcttttttgtgttccacgagacgcatcgcacgttcaagcacaagctcggccactttgatatggttttccggcacttcatcaaacgttgagctgacgacatccccagctacagagcgctcgatatcggttacttcctcaggtctttcgtcaattaaaagcacgatcagctctgcttcaggctggttcgctgtaatgctgttggcaatttccttcagcaacatcgtttttccggctttcggcggcgcaacaatcaatccgcgctgcccaaatccaaccggcgccatcatgtccataattcttgtagacaagaagttcggctttgtttcaagcaccatttgacgatccggataaagtggcgtaagagccgggaaatgcacacgctcttttgcagattcgggatcatccccatttactgcttcaacgtgcaaaagtccatagtaacgctcattttcttttggcgggcgaaccttgccagatactttgtctccgttccgcaaatcgaaacggcggatttgtgaagctgagatgtaaatgtcttctgagcttggagagtagttgatcggtctcaggaatccgaaaccttcagactggatgatctcgagaacgccttccataaacagcagatcttcctgttctgcattcgctttcagaatggcgaaaatgagttctttttttgtcagtttgctgtaataggagattttataatgtcttgcaagttcataaagctctttcaatttcatattttccaaagaggaaatagatacgtctttcataaaaacaccacgcttttcatagtcaatatcttactctgaacatgtcatctgctgcttttgcacaacatccgccaaagcacattctttttttaacataaaggaacttctatcggtaacacttccacccatgatcggcgcttttgttaaaaggattgtcttaatgagttttgaaggaagcgaggacaaaaacatgagaagatcaatacttatatcgtctgtatgcggtagaaattgaaactttcctagtgcttaaaagaaggtattacgcagtaaaattcgcagcactctttatttttaccttatttcaaaaaattattcaactgaaataaggttttgacacggaattgatagagttgacgcttttctgcaaaagttaaagcgggctcacacccgctttttctgtttgttatggacggattacaagatttggtttctttttcaagctgtgtctgccgtcaacgaaacgaacagtgcccgattttgcacggataactaagctttcagttgtaccgacagagcctttgaattgaactccttttaacagctcgccgtcagtaacccctgtagctgcaaaaatcgcgtcatcacccttcacaaggtcttccatgcgaagcactttgcttaaatcaaggcccattttgtgacagcgagtgatttcttcttcgctttgcggaagaagtttaccaatgatttctccgccgagtgcttttagcgcaacagcggaaagcacaccctcaggagcgccgcctgatccgaacaggatatcaacgcccgtgtggtcgaaagccgtgttgatggcgcctgcgacatcgccgtcattgatcaatttgattctggcgccggcctcacgaagctcggaaatgatttttgcgtgtctttcacggtttaaaattgtggcaacgacgtcctcaacgtccttgtttttcgcttttgccaccgctttaaggttgtcaatgacaggtgcttcgatgtcaatgcagcccaccgcttccggaccgactgcgattttttgcatatacatgtcaggagcattcagaagcgtgccatggtctgcgaccgcgataaccgtcagcgcgttccagccgccgcttgctaagatgtttgtgccttcaagagggtcaactgcgacatcaacgcgagggccgtacccgtttccgagtttttccccgatatacagcattggcgcttcgtccatttccccttcaccgattacaacggtccctttcatcggcactgtatcaaaaacgtctctcattgcacttgttgccgcttcatcagcctcatctttttttccccggcccatccatcttgctgatgccaatgccgcagcttctgtcacacgtaccaattccattgataaacttctttccatttcaacacgatctcctctcacaagaaaccattatgaattttgaagctgttctatttcttcgtcagtcattctttcacgccaaattgtcgctccaagcccctcaagcttcttctcaaggctgctgtatcctcggtcaatatgctccagtcccgtaatttccgtgacgccatcagccatcagtccggctaccaccaagcaggctccggcacgcagatcactcgccttcacttttgcgccttgaagctcgacaggacctgtgatgatggcagatctgccttctactttcatattggcacccattcgtctcagctcatcaatgtgcttgaatcttgccgagtagatggtgtctgtgacgacactcgtccctttcgcccttgtcaggagcgccgtcatcggctgctgtaaatcagtcggaaaccccgggtatacgagggttttgacgtcaaccggctttaagttcttctgcccgccgacaatgaggagctggtcgtcgcttgtttcgatatgatagcccatttctctcagctttgccgttaacgactcaagatgagtagggatgacgttatcgataatgacttccttgcccattgcagcccctgcaatcataaatgtcccggcttcaattctgtccggaatgatcgtatgcttgcagccgtgcagttccttcacgccgtcgattcgaatcacattggtgcccgcacctttgattttggcgcccatgctggtaagcaatgtcgcgacgtcaatgatctcaggctccttggcagcgttttcgatgatcgttttcccttctgccaaaacagcggcgagcataatgttaatcgttgccccaacgcttacgacatctaaataaatccgtgcgcctctcagcctttcagctcgcaaataaatggcgccttgttcattggttacttcagctccgagtgcttcaaagcctttgatatgctgatcaatcggacggggccctaagtgacagccgccaggcaatccaatgaccgcctgcttgaagcggccgagcatcgcccccattaaataatatgacgcgcgaagcttttttactttcccgttaggaagcggcatgctgatcatcgacgtagggtcaacaaccatttccccattctcaaaatgcacgttgccgccgatttcctttaacaggtcacgcagcgtttcaatatctgaaatctctggaagcccttcaattgtcacctcggaatttgccaaaatggttgcaggtattaacgcaacagcgctgtttttagcgccgctgatatgtactgtaccgtttaacgagtcaccgccggcaatattcaacttttccatgatagtctccttccataagaagatagctgcggagctaaataaaatgtcattttattctgtctctgcaaataaagctcatgtccaaaatctagccaattcgaagagaaagaatacaacacattgtaaaatatcaggaagaaaatagcgaagctttggggggtacaggtttcaaaagatgcacagagacccgccggctcgagagacatcgtcgtcatccggcaaaagcagtacgcatacccttcattccgatatcagcttctgcagcccaatgattccttctctgtaaagcggcgtcagcatctgaagatccgctgtatcaggtcggtgaaatacaaaggccgcggcaaacaggcataaagctgtttgccgcccctttcattatttgttccagtctgccaggaattgttcgattcctttgtctgttaacgggtgtttagtgagcgcatgaatgactttcagcggcattgtgccgatatgagcccctctaagagcagcttctgtcacgtgctgcggatggcggattgacgctgcaatgatttgcgtgtcaaggccgtgaatgtcaaaaatctgtttaacttctgaaatcaggtcaagcccgttgtggccgatgtcatctaaacgtcccaggaatggagatacatatgttgcccccgctctggcagcaagaagcgcctggttggcattgaagatcaatgtaacgtttgttttgatgcctaagtcagtaagtgctcttaccgcttttaaaccgtcagacgtcattgggattttcaccgtaatgttcggagcgatcttcgccagttcttttccttcctcgatcatttcctcagctttcaaagaaataacctctgcgcttacagaccctttcacgacgtctgtgatctcgcgaagacggtcgtggaatgatacgttagcttcctttgctactaaactaggattcgtcgttacaccggcgagaattcctaattcattcgcttctctaatttcatcgatattggctgtatcaacaaagaataacattttcaaaaagcctccctgattaagaaattttctgaactgcgaatatgattgcgctttctaaagatagacggaaaaccgcctgtcaagctgtcaggcggctataaaaagttccaattgaattaagcttggtttgaagaaccaaattcacgcattttaccgataactgtttctttgatcgcttcacgagctggtccaaggtatttacgtggatcgtactcgtcaggcttagctgccaatgtttcgcgaacagcttttgcagaagaaatttggttttcagtattcacgttgattttagctgtaccaagtgaaattgattttttgatgtcagcagtcggaattccagtaccgccgtgaagaactagcggaaggccagttgattttccgatctcttccatttctttgaagccaaggtttggctcacctttgtaagggccgtgaacagaacctaatgcaggtgcaaggcagtcgatgccagtgcgctcaacaagctcttggcactctttaggatcagcgtagattacgccttcagcgataacgtcatcttcttgtccgcctactgttccaagctcagcttctacagatactccgtggaaatgagcaagctcaacaactttagcagttgttgctacgttttcttcaaatggatggtgagaagcgtcgatcattacagatgtgaaacctgcatgaatcgctttcgcacaagattcaaagcttgaaccgtggtctaagtgaatcgcaacaggaactgtcactttgtactcttccataagtgcttttaccatagcaacgactgttttgaagccgcccatgtagcgtcccgcaccttcggaaacaccaaggatcactggagatttttcttcttcagctgcttgtaaaatcgcttgagtaaactcaaggttgtttaagttaaattgtcctacagcgtaccctttttctttagctgtattcaacatttccgtcatagaaactaaaggcatgtcgaatgtcctccttatgtagcctgattgtcttctagcgaaaaaagctttccaccctagcatgacccatatattgctgtcatatgtaaatactcagatcgctttttctccataactaggataccaacttttcgacaaatcggcaacataatgacatgattcatttgtttcttctttttgtcagttagacttcaggggcagatattttttgacggcgtctctgatttcgtcgatgtcaaacggcttggcaaagtgcgtcagagcgcccaattccttcgattcctggatcatgtcgagctctccgtatgccgtcatgataatgacccggatgttttcgtcaatgaccttcatccgttttaagatttcgattccgtccatgccgggaattttcatgtccaacagcacaaggtcgggccgttcttttgtcacaatgtcaagcgcctgcaggccgttcgcagcctgaaacgtctggtagccttctttattgaacacttcatttagcaaaatacgaatgccgtattgatcatcaacgattaaaattttttcattcatcattttacaccccaatattatgattttcgtcaaaagtaagcagtattgtatgtattctgtttgattttcctatttcctttaattataatagtctactttacgacattttctgagcattttctcttttgttgtatactgatattgtacgttataaaggaggattcacttatgttgaaaatattcacgacgcagttaacaggtattttttcccgcattcaggataaggaatctgacgcgattgaagatggggcgcggctgcttgctcaagcggtgatcagcgggcattccatttatttatacggagcgaatgagcttcagggcgtcttttatgaggccaccgaaagcaaagaacccttcccatctgtcaaagcctttccagaaaacgctgaggaagtgacagaaagcgacagggtgctgatgttttgctcagggacgggcacagccgaagaacaggagctcgcaaaagagctttatgaaaaaggtgcgggagtcgtatgcgtatcgcccgcagccaaagacagtgcgggaatagaacagtattgtgatgtgcatattgattctaaattaaaaatgccgcttgttcccgatgaagacggcacccgttacgggtttccctctttaatgacagcactgtatgtctatcacgctttatcgtttacactaaaagaaattctgcaagagtatgcataatatcttattgtacatgctggaacttgccggaaacaaataaaaaagacttgcccgcttttgacaaacggcaagtcttttttattacttctgatttgcagcttcgacagacgctccgataaagcctttgaatagaggctgaggtcttgtcggtcttgacttgaactctgggtggaactgagaagccacgaaccaagggtggtctttcagctcgatgatttcaacaaggcgtccatcagggcttgtgcctgagaatacgaagccttgctcttccatttgctgtctgaattcattgttaaactcatagcggtggcggtggcgctcgtacaccacttcatcctgatacacttcaaaggctttcgtgccttcttcaagcttacaagggtaaaggccgagacgaagcgttcccccaagatcctcaacatccttttgttcaggaagaagatcaatgatcgggtattgagttgacggatcaatttccgctgagtgagcgccttttaagcccaatacgtttcgtgcgtattcaatagacgccacctgcatgcccaagcaaatgcccaagaacggaatgttgttttcgcgcgcgtattttgtcgcgacgattttcccttcaacaccgcggtctccgaatccgcccggcacaatgatgccgtctgttccgcttgtgagttctgcgatattgttttctgtcacttcttccgcgttgatccacttcacttttacatctgtgtcaaacgcatagcccgcatggcggagagactcgacaacagaaatgtatgcgtcaggaagctcaacgtatttgccgacaaggccgattgtaatcgtttgagacaggttgctgactttgttaacaagctctttccactcggacatttccgcttctttgcatgccaatttcatgtgctcgcaaacaagcttatcaagcccttgtttttgaagctccagcggaatggagtaaaggttgtccgcatcttcacattcaataaccgcttttgtatcgatgtcgcagaaaagcgcgattttatctttcatatcttgagaaatcggcatttctgtacgaacgacgatgatgtttggctgaatgcccaagctgcgcaattcttttacgctgtgctgtgtcggttttgtttttaattcgccagcagctttaatgtaaggcacgagcgtacagtggatgtacattacgttttcacggccgatgtcgctcttcatttggcggatcgcttcaaggaatggcagtgattcgatgtctccgacagtaccgccgatttctgtaatgacaacatctgcgtttgtctctttccctgcgcggtaaacacggtctttcaattcgtttgtgatgtgcggaatgacctgtacggttcctccaaggtaatctccgcggcgttcttttttaagaactgttgaatagattttacctgttgtcacgttgctgaatttattcaggttaatgtcgataaaacgctcatagtgaccaaggtccaagtctgtttcagcgccgtcatccgttacgaatacttcaccgtgctggtacgggctcattgttcccgggtcaacgttgatgtatggatcgaatttttgaatcgtcacgttcagtccgcggtttttcagcaaacgccctaatgaagctgctacaataccctttccaagtgaggatacaactcccccggttacaaaaatatatttcgtcatttcgtttgctcctctcttcgctcttagctacatttttaaaatgtactattttataaaaaatcatttagccttttaaatgatttataagaaaaatgaggggtgaaaataagaaagctccctttcaatttcttgaaagggagcataacgtactatgttctctcttcgtttttgaagagcccaaaatacatactacatagttcgactatgaaagtcaagatcgttttgaagatgaaatctgatactatttaatttcctcttcttcatcatcatagtcttcatcatcttcatcaataatatcttcttcgatctcaagatcatcgtcgtcttcatcaagatcttcttcgtcaaaatcgtcggcttcaagatcgagttcttcctcaacttcatccaaatcaaggtcgtcttcgtcgatctcttcaaactcgtcaagatcaagatcttcttcgactgctttcttcgcttttttctttttcgccttgactgtcggctgagtttcttcatcaagctgatcataaggataccagctgcgaagcccccacgtctggtcagaaagcgccaggaagcggccgtcaatgtttaaatctgtataaaattgagcaatgcggtctccaagctcttcttttttcacgccgagcaaagatgcgatttcatttaaaagctcctgaaaaggaactggttttttatgttcttcaaataattcgtgagcgatttcaactaaagccatttcctttagctcttcctgtgaatattgtttgatacccaaggtcggacactccctttctattacttatatgtatctgttttatcaataatgaaagcgattttgtatcgttcttatacaaaccatacctctcattataaacaaaataaaacagaatatgctacccttaacagcgttaatttaaataattttacaagagtgatccgactgagagatgttttccgttaatccgcgagcattctggagatgaccagtctttgaatttcttgagtgccttcatagatttgcgtgatttttgcatcacgcatatagcgttctaccggataatcttttgtatagccgtagccgccgaaaatctgcacggcttcggtcgttaccttcatcgccgtatccccagccatcagtttggacatggcggaagcttttccatatggaaggcccgatgattctaaccatgcagcctgataggtcagtagccttgaagcttctatcattgtcgccatatccgcgagtttaaaagcgatgccctgctgctcggcgatcgattttccgaattgctttcgctcttttgcatattgaagcgccgcatcaagcgctccttgggcgatgcctacagcttgtgcagctatgccgtttctgcctccgtcaagcgtcttcatcgcgattttgaagccttctccttcttctccgagacgctttgatgcgggcactacacaatcttcgaacatgatttccgttgtcggtgaagaacggatgcccagcttcttttctttcttgcctgtaaaaaatccttcaaaatccttttctactataaaagcggtaacgccttttttctttttctcgggatcggtgacggcaaaaacaatgtaaatatcagcaacgccgccgtttgtgataaacactttggaaccatttaacacatagtcatcgccgattcgttcagcagttgttttcatgctgccggcgtcagagccagaccctgcttcggtcaaagcgaatgcgccgattttctctccgagagccagctgtgttaagtactctgtcttctgttcctctgtcccaaaggcaaacagcggccagctgcaaagagagatatgggcggaaagcgtcacaccggtggaggcgcacacttttgacagctcttccaccgcgatgacgtaggctaaatagtcacttccaattccgccgtaatcttcaggccatggaattcccgtcaggcccagatttgccatttcccgaaacagctcgcgatcgaagcgttcttgttcgtcccgttcagccgctgtcggggccacctcatgcttcgcaaaatcgcgcaccaattttcgtatcatctcatgttcttctgataatgaaaaattcattgcttctcccccattttcagatcagcgcctaaaacggattgagccagaagctcgacgacgtcgtacgttttgacttggtcttcggcttccttcgcctttgtgccgtccccaagcatcgtgagacaatacggacagccagaactgatcaccgatgggttgactgcgagcgcttgctctgtcctggcgacgttaatcctgttgcctgtttcttcctccatccacattaatcccccgccggctccgcagcacatgccggtttcccggcttctctccatttcaacaagctgcacgcccggaatggctttcaaaatctctctcggcggatcatagacttcattgtaccggcccaaatagcacgaatcatggaaggtaatcgtctcatgaagcgggtgctgcggtcttaattttccgtttttcacaagctcggccagcacttctgtatgatgataaacctcgccttcaaatccgaaatccggatattcgtttttaaataaattgtatgcatggggatcgatcgtaacgatttttttgacatcatttttttcaaattcagaaatattcttctcagccagctcttggaacaaaaattcatttccgaggcggcgcggcgtgtctcctgaatttttttctttattgccgagaatcgcgaaggacacgcccgcgtgattgagcagcttggcaaaggaaattgcgattttctggcttctgttgtcgtaagaccccatggagcctacccagaaaaggtactcaaattcttttccttcttttttcatttcttttacagtcggaatctcagcatccggcgcctcgtcacgccaattttcacgttccttgcggttgagtccccacggattcccttgccgctcaatacttgtcattgcgcgctgggcgtcactgtccatttttccttctgtcagtacgaggtagcggcggaggtcgatgattttatccacgtgctcattcatgaccgggcattgatcctcacagttccggcaagtggtgcatgcccaaatttcttcctctgtgatgacgtcgccgatcaagcttggattgtaatcaagcgccgctgcggcttcctgcgatccgctgcccgctgacgccgcagccagctgattgcctctcgtatgccgaaacgctgctgcgggcacccatggggagcgcgaggtgacggcagcgcctttttccgtgagatggtctctgagacgcaaaatcaagtccatcggagaaagcatttttccggtgcctgttgcaggacacatattggtacagcggccgcactcgacacacgcgtatagatcaagcagctgagactgtctgaaatcctcaatttttcccgctccgtagctttctttcgtttcgtcggtaaaatcaattttttcaagttttccggcagattccattcgattgaaaaagacgtttgccgggccggcgattaaatgggcatgctttgactgaggcacgtacactaaaaagctaagcaagaataggagatggatccaccatgcgatatagaaaatcaccgccgcgcctgttttcccgacaccgctaagcataaacgcaatacctgaggcaattggctcgctccaagaaagcccatgctcatgccaaatcagattcatcccgttcccaagcagaacggtcagcattaatcctccgataaaaatgagaacgagtccggctttgaaaccgcgtttcagcctcacgagcttttcgatataacgtctgtagaatgcccacccaacagcaattaaaatgagaaacgtaacaatttcctgaaaaaaggtgaaggcgggatagaccgggccaagcgacagattccggccgggagccagtcctttgatgataaagtcaattgctccgaactgaaccaatataaatccgtagaaaaacatgacgtgaatgattccgcttttcttgtccttgagcagttttttctgtccgaatacattcacccatatggcgtgaagccgttccttgaaccgttgatcaaattgttctttctggccgagcttgatgtaggccagtctcgttttgaccaagtaaacaaacaaatagacagcgtaagcggttacaatcagaaataataatgcatttgcgatgagaaagccgctcattccaattccccctttttactgataaagaccgcgatcccctacccccgaatctgtataagattatctttatgataaataatgaatgagtgttcagtcaataattaaattcctgctgttcgggcacactacctttactacggaaaggagtgccggtatgaaggtatttatcgtgattatgatcattgtcgttattttctttgccttgattctgcttgatatcttcatgggccgtgccggatacagaaaaaaggcgtacgagcctgttttttcaaaaaagaagagtgacatcgaattgatccactgcggcgctgatctcgttgagcggatgatgaatgatattcgccaggccgcctcttctgttcacatgatgttttttattatgaaaaatgatgaggtcagccacaatatgtataccttgctgaaaacaaaagcccaagctggcgtatccgtttatttgcttctggattgggcgggctgccgggcaattaaaaaaacggcgcttcagacgatgaaaaatgccggcgtccatgtccatgtgatgaatcgtccccgttttccttttttcttttttcacatgcaaaaacggaatcaccggaagattacggtgatagacggaaaaatcggttatatcggcgggtttaatatcgccgaagaatatcttggaaagaaggcgaagttcggcaattgggaggattatcatctgcgcatgatcggagaaggcgtacatgatcttcaaacgctttttgcttctgatctaaaacgaaataccggaatcgaactgggttcggatgtttggccaaagcttcagcaagggactatttctcacaagatctatgcgaccgacggttattcccttgaaaacatatacttggccaacattgcccaagcgaagaatcgccttacggtttgcacgccttattacattccatcaaaaccgcttcaagaggcccttattaacgcaagaaaaaacggcgtatccgtgagaatcattgtaccgatgaaatcagaccatccgctggtacgagaagcggcttttacgtattattcggagctcttggatgccggctgtcttatttatcgttattatcaagggttttatcatgtaaaagccctcatcatagacgaccatctcagcattatcggaacagccaacttcgataaacggagcctgttcttaaatgaagaggtgaatgttgaaattgatgacgaagcgtttacaagtgaagtctatgccacaattgaggaggatatgaaaaagtcggagctgctgacgatggaggatttcagcaagcgcacattcaggcagcgcccggcggaatggctcggcagggcattatcttatttcttataaaggagagttcctatgattttcagattcgggttcgtttcaaatgcgatgagcctttgggatgcgtctcccgctaaaacattgacattcgcgcgttattcaaagctttcaaagactgaaagaaaagaagcgcttctgactgtgacaaaagccaatttgcgcaatacgatgagaacccttcactatatcatcggccacggcattcctttgtaccgtttttccagttcgattgtgccgctggctacgcatcccgacgtgatgtgggattttgtaacaccgtttcaaaaagagtttcgggagattggagagcttgttaaaacccatcaactgcgaacaagctttcatccaaatcaattcactctgtttacgagcccgaaggaatccgtcacaaaaaatgcggtaacagatatggcgtatcactaccgcatgcttgaggccatgggcattgctgatcgctccgttatcaacattcatattggcggcgcttacggaaataaagacaccgccactgcacaatttcatcaaaatataaaacagctgccgcaggagatcaaagagcggatgacacttgaaaatgatgataaaacatatacaacggaagaaacgcttcaggtctgtgagcaggaggatgttccgtttgtctttgactttcatcatttttacgccaatccagacgatcacgccgacctgaatgtagcactgccccgcatgatcaaaacgtgggagcggatcggccttcagccaaaggttcacttgtcttccccaaaatcggagcaagcgatacgcagccacgccgattatgttgacgccaactttttgctgccactgttggaacgctttaggcaatggggaactaatattgatttcatgattgaagcaaagcagaaagacaaggcgcttctccgcttgatggatgaattaagctccatccgcggtgtcaaacgcatcgggggcggtgcgctgcaatggaagtcataaatgtgcaaaaataggtttacgacttgtcagctttgggaacttaggctatataagacaacaatcgatggaggagaaagatcatgaaaaatatcaagtctctgaaagtagccgcacaggcctttactttaagaaatttgattcatctttataaaatgtgccattccggaagccacgaggtttatatttattcaaagaaaacgatgtgcaaaatcaaaagcttaattgagcttgaaacgttccgcatggctcataatgaaaaggaatatctgatcgtagttgaaggaacaaaagcatcacagctcattgaaaaattccaaaatctcatcgagcctgctgagagagaagcgctctaacttacatacaaaaaaggatagacatctgtctatcctttttcttatgctcttacataatggagctgaaccgcttgtccaaattgttttgtcccttttaaccgcagttttgtttcatttgttagttcgtgaaacagcgggatgccgcttcctaaaacgacgggaataacagtgatgatgaattcgtcgatggcatcttctttcataaagtcattcacaagctctgccccgccagctatccagatgtttgagcctttttcctgtttcaaacgggcagtgaaggctctggctccctcattgataaacgtcacatgttcatcttgataactgtcgggcgatcctgtaaaaacatagcaggttttatcctgatacgggaaaaccggtgttagcactttaacgtgctcatatgtgctccgccctaaaatgactgtatcaacagtctgataaaaatcactgtagccgttgtcaccttcaccttcaaattcatccagccaatcgatgcttccatcttcttttgcgatcatcccgtccaatgaaacagcaatgtacagcacagtttttctttccatgttctcctcctatcgatgcaccatttgcccgaattgcgcttgatgcagcctgctgtataggcctccggcttcgatcaggtcttgatgacggccttgttcttcaataccgttgtttgtgacgactacaattctgtccgcgtctttgattgttgccagcctgtgggcgatgacaagcgtcgtgcgcccctcagacaactcttgaagcgccttttggatcgccgcttccgtctctgtatcaagggctgaggtggcttcgtcgagaatcaagatcgacggatttttcaagaacatccttgcaattgacagacgctgtttttgcccgccggaaagcttcacgccgcgttcgccaatcatagtatccaacccatcgggcatgttatggacgagctcttccagatgcgcctgcttcacagcttgccaaatgtcttcttctgatgcgcctagtcggccgtaggcgatattttctctaagcgtgcccgagaataagaaaacgtcctgctgcacgacgccaatctgcccgcgcaacgaagaaagcgtcatgtcttttatactgatgccgtcaatcgtaatgtcgccctccgatgcttcataaaaacgcggaagcagactgcaaagcgttgatttcccagcacctgacggaccgacgaacgccaccgtttcccccgcttgaatggataggttgatgtcattgaggacattgtgatggtcatcatagccaaacgaaacatgtttatagcggatattgcccttcaggccggaaacatctttcgaatcaggtgagtcctgaatatccggctctgtctccatgagctccatatagcttttgaaacccgcgatccccctcggatacatttcgataatggcattaattttgtcaataggcctgaacagcacattcgtcaagagtacaaacgccacaaattccccgtacgataaggagccgcgaatgacaaaccacgtcccgcacaaaaggacaaacagcgtgacaaaccgggtcagcatatagctgattgaaccgtttttcgccatgattttgtaggaagaaagctttgtgacacgaaaacgctggttgttgacggcgaagcgttctttttcaaatgcttcatttccgaacgcctgcacaagccggatgccgccgatgttattttctacacgcgcgctgaagtctccgatatccttgttcagcgtggtaaatgctttggtcatttttttgttgaaataaagcgctagccaaatgacgatcggcataatgataaacgttaataaagcaagctgccagttaataaacagcatcactccgaacgccccgagaatggtcatgaccgcaatgaataagtcttccggtccgtgatgggcgacttcaccgatatacattaaatcgttcgtgagcttcgacatcagcgttcccgtcttgttgttgtcgtaaaatttgaacgagagcttttgcaaatggtcaaaaagcgactttctcatatcagtctcaatattgataccaagcatgtgtccccagtaggtcacgatatactgaagagccgagctgagcgcgtacaccgcaaataacccgattgaggtcgcgatgatcagtccccagtccctgcccggcagcaaggtatcaataaaataattgacgatcaaaggaaaactcagctccattaaacctcccgcgatcgctgagaaaaagtcgagaaagaacaacgttttatatggtttataatatgaaaaaaattgccgcagcaccctatcttcccccaatgtataaataactgataatatttctcaattatactatacacgggctgttttgtaagatcagatttcttttttcttacagaacacctgaaaacaggcgggcaaacgactcttttgtccggtcagccacacctcttttataaaagccgacagggctgagcttttcactttcctgcatatcctcttcaaaatgggcctcaagggttcggatcgcttcggcatccgtgaagaacacattcacttcaaagttgagctgaaagctgcgcatgtccatattcgcggtaccgacggaggcgagatcgccatcaatgatcatgactttttgatgcatgaagcctttttggtaggagtacacttcaatgccctcaaggagcagctccgggaaataggacctcgacgcgtattgggtcaaaaagctgtcgttcttctccggcaccataacccttacctctaccccctttgtcgccgctgcttttagcgccgtgcgaatggattcattggggacaaaatagggcgtggcgatccatattgatttctgcgctgaagaaatcatttcataataaaggtcgctcatgctttccttcatgtcagggcctgtcgcgacaatttgataaatgcctcctccttccacgggaaccggggtattgtactcctcttgatcaattagcacttcattggagacatattcccaatccagcataaagatagcgtggagcgtttgcacaatttccccctcaagccgcaggtgtgtatctctccaaaatccgatgtacggatctctgctgatatattccttcccgacatttaatccacccacaaaaccggttttcccatcgatgatcacgattttccggtgatttctgaaattcagcttctggttgaaaaacccgtatttcagcggagaaaacgggacgatgtccacccccgcttgtttcattctcataatatctcttcttgccagcttcatgcttcctgccgcatcgtataaaaacctcacctcgacaccctggcgcgctttctccatcataatatccatcatgccgcgtccgagcatgtctgatttaaacatgtagtattcaatatgtatgtaagattccgcttttctcattgctttgaaaatgtccgggaaggtttcttcgccgtttttcagcactttgatgttgcttttcgtattgatattcatatgggcagccctgatggaatatgtaaagaacctctcttgattgtccttcagccctgtcacttcgggcgtttcctccttgtcaaacagcttcctgagcttttccctgttgtacattcgttttgtcttaaacagctttccctttacataaagctgtcccgaaaacagataaaacacgtagccgacgattggaaaaaagacaagaatatggatccatagcagcgtgtgctgcgaggtgcggttttcaagaattaatgaatagatgctgaacaaaataatgcttatatagcaaagcaatcctccgtaaaactcaagtctggaaaccggaaaaaaccaaatgacatatgccccgatgagcatcatatataaaaagaaaaattccagtctccttttcagcatcctgattctctccaatctgattcaattacctctgtattacctcttttttctaatcgataaaccttgtaagtaaaaaacctctccgccaaaggaggagaggtttagagaaaactaactgtcacggaattcatccgcatcgtttctgcagaaataaagcaagactattggcaacgccgagtgacaacatgagcggcaagctgaacccgctcagcactccggcaagcgccgaaaagaaggcggcgctgtgactgcaaatacggtggatagagtaaatttgatacccattctgatgagagaaaatatataaaacgggaaattgatcagaaagatataaggagttagtcaggctgaatcataatctggctgttccgccggtttaaaatgagtaaaatccttgatgttatttccatatacaaacataacaggattcccggcagcccagccattaccttggcagaaaaaaccccctcttgcaagggggattttcacgagcgtttccgatatacaacgtagctgcgggtcagatacttgagcggcagactgaacacatgaaccaatctcgtaaacggccacaggataaaaacgacgtatcctatcacaatatgaaacttaaaccatagcgggacactctccatcaaagaggcgtcaggcctgaacaaaacgatttccctgaaccagggcccgactgtggtccggtaatcaaatcctttcgaatcaatgttgagaaacgtggccgcaacgcctgacagcatcatgaacagcagcaggaggagcgtaaggatatcggatggcgagctcgttttgcggattcttttgtcaaacagccttctgtacgtcaggatgacaagtccggtacatgccgcaatgcccgccggcaagccagcgccaatcgccattttgtgatacatatgctctgaaatgccaagggaagcatacacgccttctgggatcagaatccccatgacatgcccgccgacaacgcacagcagtccccagtgaaaaagtgtgctgccagccgcaagttttttcttttctaacagctcgcttgatttcgccgtccagccaaattggtcatgctgatagcggtaaatatggccgccgataaagattgtcaatacaatgtatggcataataccccagaggatctgcccgctcatgcctgaacagccccttcaacgctttcacgtacgccaatgttttcaagcgcggccagcagcacgtgcagcagttcagcgtatatactgtcatttttttcgagacgggatgccagctccctcacattggacagatatttctcaaacacgcttctcgctgcttcaatttctgcagccgcagcaaattccagcatcagcggcagataatcaggcagctctttctctgtcggcaggaaaccggattgctcgtatgtgttttttaaatgcagcaattcaatgccgcgttccctttgctcgcctgagttaaagtaggtgacatacatatttgtttttttcccgaagtcgaatgtatagacatagtgttcaatcagcgcttccggagaatagctggctgacgtctcgaaaaagtgcagcagcttctcccggatttgccggttgccgatttcttggataagagccttccaatcgggaagctcggctctccactcttcatccggataagagagaagacaggaaagagcagagaacgtgatttgccggtctgtggtgttcatcttgttacacctcatttatcaaaagttagaaacaggagccggggccgcctgaaaatgataagccgcagcttccttgttcagcgtataaatctgatacttcttctcgatggctgctcggaatcacaaagcggtcatcatatttggcaatcgcaagcagccgatacatatcttcaatttgctgttctgttaagccgacactggagatcagttccggatcgattgatttattcgtctggaccgctctcatatactggcgcatgacagacattttctttaatgttgaccgaatatgatccgtatcaccggctgttaacagctgcgccaaataatctatcgggattctcatttggtcgatagccggaaaaatatcttccgccgtttgccggctgccttttccttcaaagagattcataatcgggctgagcggcggaatgtaccacaccattggcagcgtgcggtactcaggatgaagcggcagcgcgatcttccagtcaatgatcattttatagatcggtgattgctgcgcggcctctatccattcagccggaatgccttgttcttttgccagtttggcaacctcaggatcattcggatcaagaaaaacgtccaattgggaatggtagagatccttttcattttcaacagatgccgcttcctccactttgtccgcgtcatatagcatgacgccgaggtagcggattctgccaacacacgtctcagagcagatggttggcagtcccgcctccaaacgcggaaagcagagtgtgcatttttccgctttgttcgtttgccagttaaaatagacttttttataaggacaggatgagacgcaatatctccatgaacggcatgcgttttgatccacaagcacaatgccgtcctcctcgcgtttgtacatggcgccggatggacaggatgagacgcatgccgggttgatgcagtgctcgcaaatacggggcaaatacatcataaagacgtcatcgaattctgttttgatcgattcctccatcttttgtacgttgggatcttcaagtcccgtaatgtggccgcctgcgagatcgtcctcccagttcggtccccattcgatattcatgaaatcccccgtcaaggacgatttcgggcgtgctaccggctggtgttttttctgcgggctgttcgttaatgtttcataatcatagttccaaggttcatagtaatcatcaattgacggctgattcggattatagaaaaggcctgcaagccgattggttttcgagcccgatttcagctcgagctttccttttttcaatgtccagccgcctttatatttgtcctggtcctcccattgcttcgggtagccgatgcccggctttgtttctacattattgaagtacatatattccgcaccggaacggtttgtccacgtgtttttgcaggtgacgctgcacgtgtggcagccgatgcatttatccaagttcatgaccataccgatttgcgctttaatcttcaagccaatcgacctccttcagcttgcggatgacgacgttcaggtcgcgctgattccccgttggaccgtaataattaaagccgtagctgagctgggcgtagccaccgatcatctgtgtcggcttgacgtgaatccttgtcgggctgttatgggtgcctccgcggttattcgtcagctttgtgccgggcacgttgatgtggcggtcctgggcatggtgcataaacgccattcctttaggaatccgatgagacaaaacggctctcgcgacgacaacgccgtttcggttgaagcattcaatccaatcgttgtctttgatatccgtgtcctctgcatcatctttattcatccacacggtcggcccgccgcggaacagcgtcagcatcggcagagaatcaaaatacatgctgtggacagaccatttattatgcggcgtcaaataattgaggacgatttcttttccctcttgatcaggccgtttgctcagaaacgggcgatgctggaggatcggtttgaatgtcgccatcgtttcaccgaattccatcatcagttcatgatcgacataataggattgtctgcctgtcagcgtccgccacggaattaatttttcaacattcgttgtaaacggcgaatacctgcgccctcctttttcagagccggtaaacgctggagacgtgatcaccgttttcggctgggctgtaatttgttcgaacgtaaagcattcttcctcgcgttcttccgccaggtctttcagcttcaggttcgtgatgttttcaagtgattcccatgcttttactgcgacctttccattcgaagtggatgatagggttaaaatcgcttctgcagcctgctttgcttcacttatatttggacatccctttgccacgctgtccgaggtgatttctcccagtctctgtttgagtgattcatattcatcggctattgaccagctcatcccttttgttccgctcggctttaaagcaacgttcggaccaagtgcagtcattttatgaaaaatgtgtttgtaatcccgttcaacgacttggatgttcggcatcgtttttcccggaatggcttcacattcgcctttgctccagtcattgattttgccgaatggctgggccaattcctgcatggtgtcgtggagcagcggtgtcgcaaccacttctttcaccggctccatatcgacttcttctgccagatcggaaacggcttttgacagcgccttgaaaatatcccagtctgacttcgattcccacggagccgagatcgcaggagcaaatggatgaatgaacggatgcatatctgtgctgctgagatcgtgtttttcataccatgtcgccgccggcagcacgatatcggaatacagcgccgtacccgccattcgaaaatcaagattgattaataagtcgagctttccttccggcgcctgctcccgccatttgatttcttctgggcggatgctgtcgctgtcgtcattcattaaaccgttcgttgtccccagcaaatgcttgagaaaatattcatgcccttttcctgagcttgagatcagatttgcccgccatacaaagagattccttgggaaattcacttcattgtcaggatcttcaatcgcgaatttcagttttttctcttggagctgtgaggccacgtacgcacctacgtcttcaggtgttgctgcccctgctttttcagcttctttatacagatcgatgccattttgattgaaagtcgggtaagacggaagccaccctagccgcgccgccagcacattgtaatcagcgtggtgcttgtagcgggatgaagcagcaatcggtgatgccaaatcactgatcggctggtcctcataacgccactgatctgtcgcaaagtagaaaaatgaggtgccattttgcagcttgggcacgccttcccagtcctttgcagttgcaatcgtctgccacccttcagcaggtcggagcttttcctgccccacgtaatgggcccagcctccgccgtttacgccttgggcgcctacaagtaaaacaagatttaacactgctcggtagatcgtgtcggagttgaaccagtggttaatgccggcccctacgataatcatggaccggccgtctgtatcgatcgcattttgggcaaactctctggcaatcttaacgacagcttcttttttgattcctgtcatttgttcctgccaggcaggcgtaaacggctcagggtcatcataggagacagccgatcgttcgccgatgccccggttcacgccgtagttagccagtatcaagtcaaacacggtcgtgatgtacgtttcttcaccgttcaggttcatttttttaataggaagatcccgctcgagcactttgtttccgtcatttgaaaaatacgggatgcgcaccgtgccgatttcgtcctctattcccagcacagagagacggggttcaatcggttccccggtttcttcatcaatcatgtgcaggttccatttctgctgcccgtcccagcgcgagcccattgtcccttggggtatggcaaatgaacttgtctgttcatcccaaaccgcaggcttccactgatcatgctttgtcttccgcccgatgtccttcgcatgcagaaaccgtcccgctgtgtatacgccattttcttttgacagagtgacgagaaatggaaaatcagtgtattgcttcgcgtactcaataaaacgttcagtttcttggttcacgtaaaattcctgcagaataacgtgacccatcgccatcgcaagcgccccgtcagtcccttggcgaatactcagccagtcatccgcgaactttgaggattccgcaaaatctggactgatcgaaatgaccttagcgcctttatagcgggcctccgccaaaaaatgcgcgtcaggcgttctcgttaacggaacgttggagccccatgtgataatatagccggaattgtaccaatcactgctttccggaacgtccgtctggtcaccccaaatttgcggggatgctggaggaagatccgcataccagtcataaaaactgagcatagggcctccgattaacgacataaaccgggagcctgatgcgtggctgatcatggacatggccggaatcggagaaaaaccgacgtttcggtcaggcccgtatttcatcactgtatacagcagagaggctgaaatcagcttcagcacctccggccattcagcgcgcacaaaaccgcctttccctctcgcctgtttataggacttcgctttttcagggttttcgacgatcgatttccaggcttccaatggattttgatgcgtctgcaatgcctcccgccacaaattgatcagcacaccgcgcacgtatggatatttcacacggagcgggctgtagatataccatgaaaaactggccccccgcgggcagcctctcggttcaaaatcaggcatatccgggcctgttgatggataattcaaattttgcccttcccacgtgactattccgtttttcacataaatattccagctgcaagaccctgtacagttgacgccgtgggtggagcgaacgactttgtcgtactgccatctgtttctgtatacattctcccaatcgcgatcctcgcgggtagtttggctatgtttatttgaatggtgttcgataggagagaaataattcaatctcctaaacaacggactccttttctttttcttcatgagagttcactccttccgagtcaggtgatgctaagttcactataaacagagacagcgtgtttccttgtgaactatgtcacacactctgcttttttcacaaaatgttcacacaaaggagaaggaaggctgcgttcaggcaggacgcttgggtcattagctgcctttcattcaaagatcaaaaaaaaccggctctatttaagaaccgggctcagcgttttcatcctgtgatgtatgcagataccgcaaaaataattgataggaacaaaaaacattttgctgaagcatagccaaaaagttcatttgcagctgcggatgataagacatcattttcttaaatatgtaatatgggatgttgagaatcagaatgtctgaagtggcattgactgagataaagggcgataaataaagcccgcctttttcatcaatcggaaacacatcgcctttttcccacagcgcaacggttttcgacccttcagggagccttgtgtccataaaacggacactgccttttaatacaatataaacagattgagaatgaagaaaagatggagactgatcacatgaaccgcggataaacgtgccgtttttcagcaaggtttcgacaatggatagaggcacttcattaaacataggaagttgtttcagaaataataaatagtcacactgattcataggaaaacctcctgtgctaaggatagctttagtgtagctcgactgagcctgtacagcagtgatgtatttcacagcctgtatgatgaatgtcacttatcaggagggtgaatgcatttataatgaaagaaaaaaggaggatttcgatgaaggcgctgattccgaagcagcacggggcgtgggcgatgctgctgatcccatttttactcggcatggtcaagggaggccccgttatttggcatattccgctcttccttggttggcttttcctatacttagcggtttatcccgttacgcttgccttaaaaaagaaacaaagcaaaccatatcaaaagtggatgtgttattacggttttcccacctgctgctttttgatgatctcggtctttcataagccgcctctcatctgggtgggcgtttctttactgccgctgtttctcatacatatgtattttgcccgcagaaaaaacgaacgagccttattgaatgatgttgcaggtgtcttgttcttttgttcgggcgggtttgcgagctgctggctggggatgggaacccttgacggctgggcttggtttattttcttgcagtctgctttattttttatcgggagttccttttatgtgaaatcggtgatccgcgagagaaaaaacagggcatttgcatactggtcatggggatatcacctgctgctcccctttttatccgctcttttcggagcaggatgggcgtttctcgcttttatcccgagcagcttgcgggcatggttttttcatggaagggattggcccgtaaaaacgattggcattctggaaatcgtgaatgcctgcttctttcttgccgtcatgtgcctgtttatcacaaggtaaaaaaacaaggacaccgctgtccttgtttttttcagtcaatattgcaaatctccagcgggcaattttcacactcaatctcacatcgtaaatagtcccgcttgtgcaaaataatttttccggattcgtctatcgaaataaccccttttttgcggagatctccgagcatacgattgacgctttcccgtgcagccgcgcaaaactttgccaaatcctgatttgtcaggacaatgttaatcagaatgccgtcgcttcgctccactccgtagctgtttgataagcggataagggtagaatagagcgccccctttttgccatgaagaagcagatccctgattttggactgaatcttccggaggtgcgtgctcatccatttcatgaactcaaatgtcaaagcgccgttttggattaattctttttccagcttatttttattaatgacgagcacctcgccatcctctagtacttttgcactgagcatataccttggttcttcagtgaaaagtgttaattctccgacgatatcatgcttttggcagattctaagcgtcaggtcttttccgtcagatgtcagcttgccgatttcaatgagtcctgattgaatcagataaagctcttctgcatccattccttcccgaaacaaatacgtgtgtttttccatttttcttttcgtgctgatcgattccagcaattcatacagatcgctggatataagatcactatcagatggtcgaacagagagaaaattcatgagctcacctcgaagaaagtcacgttgtgtgtttattgtaacgtgaattgatttgtacccatcgagaaaaaactaacaatcttgtgaatgccccagtgttagttgatgctctggctgtttctctccgtgtgtgttttcattctttcctgccaatacatccatatgacaaggacaaaactggctaacgccacctctgaaagcgccataaacccgatcgcgtactggcctgttgcctgaaatacactcgccaatatgagcggaggaaaaaagccgcctaaaccgcccatggcagacacaatcccattggcaatccccgcttgcttcgaaaaatagaaaggcaccagtttaaaaacagttccgtttcctatgcctgagcagacggccacggttaatgatccaaacgtataaaggccgattgtcggcgagaacgataggataatgcctgataatgtaagcccggcaaaaacaaacatcaagatgcggagcgggctcattttatcagccaggaatccgcccgcaggcctgagcagcgtagaaaccgcaataaagccagccgtccgcaagccggcatctgcaggattcagcccaaaatgctccaccagaaagttcggcagatagatagtgaaggcgacaaaggcaccgaacgtaataaaataaaacaggctcagaaaccatagcacatgatttcggtaaacagctttgatttgagtcttaacagaaactttgaccttcttctcatgcctgtcgccaaacaatacgtgcagtaaggcaaagacagccagcaaaatcagatacatttgcacggttgatttccacccgacggcttgagcgataaccggcgctgcaaatgtcgtaacggctgtcccgatatttcctgcaccgtaaatcccattgacgacaccgtgcttttctttcggataatatttcgggagggaggtcaccccaatggaaaacaccgctcccccgatccctaagaaaaagccgcctgcgattaaatcaaacagagaatccgcgatactgatccaaaatacaggaaataaaagcaggatgaagctgaccataaacatgagccgcgcgccaaacctgttcgttaaataccctaaaggaatgcggagaagcgacccgaggatcacaggaatcgcggtcactaaagaaatctcacccttgcttaaatgaatatctaatgtgatttgggaaatgagtgatgaaatcagcacccaaaccataaaccctgccaccaagcttaatgactgtaacgataattgaatgtgttgacggttgatcatttggcttgcccctttcaatgattcaataatcagtcttatcatacaaaaactagccaaacaggattgtgaattacatcacacgtttttctcataaaaaaaggacaaagcccgaagactttgtccttttgatcgtgattacattttttccggagccgatacgccgatcagctgaagcgcattgttcagcgtaatttgcgttgccttcattaaagccaggcgcgcgcggcttttctcttcattttcagggtcgatgactttctctgcgttgtagaagctgtgcagagcagaagccagatcataaatatagttagtgacacggtgcggaattcgtttttccgctgcttccgccactgcctctgggaagccgccgatcgttttcagcagatcgtattctttttctgattgaatatggctgaaatcaagatctgccgccggtttaagcccctgctcttccccttggcgaagcatgctgcaaatacgggcatgcgcgtattgtgcataatacacagggttttcgttagatgttgatacagcaagatctaagtcaaaatccatatgggtgtctgcacttcgcattgcaaagaagtaacgcacggcatccaagccgacttcttcaatcaggtcacgcatcgttacggctttaccggtccgtttgctcattttcattttctcgccgtttttgtaaaggtgaacgagctgaatgatttctacttcaagcgttcctttttcatagcccagcgcttcgattgccgctttcatacgcgggatgtagccgtggtgatcggcgccccaaacgttgatcagcttatcaaagccgcggtcaagcttgtccttatgatacgcgatatcaggaagaaggtacgtgtacgtgccgtccttcttgatcaatacgcggtctttatcatcgccgaaagtcgtggaacggaaccaagtcgcgccgtcttcttcatagacgtggcctttttcgcggagcgcttcaagcgccttgtcgatttttccattttggtacagtgaagtttctgaataccacacatcaaacggcacacggaagttttccaagtccttgcgaagcttttccagctcgtatttcaggccgtattcacggaaaaacgcgaggcgttcactttcctcttcgttaacgaaacgatcaccgtattcctcagcgagacgctttccgatcgcaatgatatcctcaccgcggtagccatcctccggcatcggtttttccaatccgagtgcttcaaagtaacggacttcaacagaaagcgccagattgttgatttggtttcccgcatcgttaatgtagtattcgcggcttacatcgtaacccgcttttgaaagcacgttgcacaaggaatcgccgacagccgccccgcgcgcatgcccgaggtgaaggtctcccgtcggattcgctgatacgaattctacctgaactcgttcaccgtttccgatgttcgtttccccgtatgcttcccctgcttccagtacagacggaatcagctttgttaaatattgattgttcatatagaaattgataaaacccgggccggcgatatccagtttttcaatcgaagccttccctttatcaaaatgggcgacaatctcttcagcgatttgacgcggcgctttttttgccactcttgccaactgcatcgccatattcgttgagtagtcgccgtgtgttttatctttcggtgtttctaaaacaacattgggaatctggctttcttcagccagtcccgctttcagaacggccgctttgatttcttctttcagcacgtccttcatttgttccgcaatgttcatgcgtgagttcctccctcatacgtgatcgtcatattatgtaaatgctcctgctcgtctccgacatgcatgtcatatgcgatgctgatacggcctttttcttcatcgagatcagattgaatcgattttgtgcttgttttcagctcaagctcaccaaatgacattttatatttagcaattgtggaagctcccgttacgaaacgctgattcattttgacagcgcctgacctcatgaccaggacttcgccttcgcttactttcacaatcgttttgactttgcctaagtcgtgttcttcataataagatagatacactttattttgttttacatagtaaaatccggtggtgcggaattcgatgacttcttggtttccgtcatcctcgatcacagacttcacatggagtgttatcggtgtctcttgcttcattctgacacgtccttttcatcattccactttgacttgaatagtataatcattcggtttgtaaacttcaactgcttctatcttaccatcattgctcatcagatttgaagataaacctcataaaaagcatttccttatatagaagagaaaatcatatcactaattacctttaggaaatgttacatttttccgaaatctatcatttccttttcacatttttttcaaaatatatgtattgaattagtaatttgatagttttaagataaaagtacaacatagatctgctagaaaaacaaaaaaagggaggattcaattatgaaaaaagctgtcattgtagaaaacaaaggttgtgcaacatgctcgatcggagccgcttgtctagtggacggtcctatccctgattttgaaattgccggtgcaacaggtctattcggtctatgggggtaaggatctcccaaaagggcatagtcattctactatgccctttttaagtaaattacaatttttaactaaaatctacctcttggatatacatacacaaccgtttttcatttgaatcatatgtataggggatggtattttgtttatagagcagatgtttccatttattaatgaaagtgtaagagttcaccagcttcctgagggcggcgtgttagaaatcgactacttgcgcgataatgtctccatttctgactttgagtatttggatctcaacaaaacggcttacgagctctgcatgcgcatggatggccaaaaaacagctgagcagattttagctgagcaatgtgcagtgtatgatgaatcaccggaagaccataaagattggtattacgacatgctcaacatgctccagaacaagcaggttattcagcttggaaaccgggccagccgccatacaatcaccacgagcggaagcaatgaatttccgatgcccctgcacgccacctttgaactgacgcaccgctgtaatttgaaatgcgcccactgttatttggaaagctcacctgaagcgctcggcaccgtgtcgattgagcaattcaaaaaaacggctgatatgctgtttgataacggtgtattgacatgcgaaatcacaggtggagaaatttttgtccatccaaacgccaatgagattcttgactatgtgtgtaaaaagttcaaaaaagtcgctgtcttaacaaacggaacactcatgcgaaaagagagcctggagcttttgaagacttacaagcaaaaaatcatcgtcggcatttctctagatagtgtcaattccgaggtccatgactcctttagagggagaaaaggctcttttgcccaaacttgtaaaacgataaaattgttgagtgaccacggtatatttgtcagagtcgctatgtctgtcttcgaaaaaaacatgtgggaaatccacgatatggcccaaaaggttcgggatctcggggcgaaggcgttttcttacaattgggttgacgatttcggaagaggcagggatattgtccatccaacgaaagacgccgagcagcaccgcaagtttatggaatacgagcaacatgtgattgatgagtttaaagatctgattccgattattccctatgagagaaaacgcgcggcaaattgcggcgctggctggaagtccattgtgatcagtccgttcggcgaagtacgtccttgcgccctctttccaaaggaattttcattgggaaatatttttcatgattcctatgaaagcatctttaactcccctctcgtccataaactgtggcaagcgcaagcgccgcggttcagcgaacattgcatgaaagacaaatgcccgttcagcggctattgcggaggctgttacttaaaagggctgaactctaacaaatatcaccggaaaaacatttgctcttgggcgaaaaatgaacaattagaagacgtggtccagcttatttaggagggaaacgatttgtcaccagcacaaagaagaattttactgtatatcctttcatttatctttgtcatcggcgcagtcgtctattttgtcaaaagcgattatctgtttacgctgattttcattgccattgccattctgttcgggatgcgcgcgcggaaggctgactcgcgatgagcattttggatatacacgatgtatccgtttggtatgaacgggacaacgtcatcttagaacaagtggatttacatttagaaaaaggcgccgtttacgggttacttggggtaaacggcgccggaaaaacgacactgattaatacgctgacaggcgtgaaccgcaatttcagcgggcgttttacactgtgcggaattgaagcggaggccggcatgccgcagaaaacatcagatcagctgaagactcaccgttacttcgccgccgattatccgctgctatttacagaaattacggcgaaggactatgtgtctttcgtccattcgctttatcaaaaggatttttcagagcagcagtttgccagtttggccgaggcctttcatttttcgaaatacatcaataggagaatttcggagctgtccttggggaacaggcaaaaggttgtattgatgacaggcttattgctgcgcgctcccctgtttattttggatgagccgctcgtcggtttggatgtggaatcgatagaggtcttttatcagaaaatgcgtgagtactgtgaagcaggcggaaccattttgttttcttctcatctgctcgatgtcgtgcaaagattttgtgattatgcggctattcttcacaacaaacagatccaaaaggtcattccgattggagaggagaccgatctgcggcgggaatttttcgaggtgatcggccatgaataacataatccctatcatgtctttgctgttcaaacagctttacagccggcaagggaaaaaggacgccatccgcattgccgcaggccttgtcattctggccgtgtttgaaatcgggctgatccgccaggccggcattgatgaatcggtgttgcgcaaaacgtatatcatactcgcgcttcttttgatgaacacatatatggtgtttctttccgtgacatcacaatggaaggaatcttatatgaagctgagctgcctgctgccgatttcttcacggagcttttggctcgcccagagtgtcgttttgtttgtcgatacctgtttgagaagaactttattcttttttattttaccgctgttcttatttggaaacggaacgctgtcaggggcgcaaacattgttttggctcggcaggttttcgttttttaccgtttactccattattttcggagttgtgctaagcaaccacttcgtcaaaaagaagaacttgatgtttctgctgcatgcggcgatattcgcctgtgtatgtatcagcgccgctttgatgccggccgccacgattccgctttgcgcggttcatatcctgtgggcggtggtcattgactttcctgtctttctgcaggcgcctccgcagcagggcaagatgcattcatttatgcggcgatctgaattttcgttttacaaaagagaatggaaccgatttatctcttctaaagcgatgctgttaaattacgcggtaatggcggtattcagcggcttcttttcgttccagatgatgaacaccggcatcttcaatcagcaagtgatttatatcgtgatttccgcgcttttgctcatctgctcgccgatcgcccttttgtattcgattgaaaaaaatgaccggatgctgctcatcacgcttccgatcaagcgaaaaacgatgttttgggcgaaatatcgcttttattcaggcctattggcaggcggatttctccttgtcgtgatgattgtgggtttcatcagcggccgttcgatttcagttctcacttttttgcagtgcattgagttgctgctggcgggagcgtatatcaggttaactgcggatgaaaaaaggccctccttcagctggcagacggagcagcagctatggagcggtttctcaaaatatcggtcttatctgttttgtcttcccctattcttagccatattagccggcaccgctgtatccttggcggtcattccgatagccggtctggtcatagtctattacctgcaaaaacaggatggtggtttctttgatacaagcaaaagagaacggcttggaagttaacctgctgaagactcatcaattttcaactatttcaatcgccgcgagctttctgaaaccgatcgaaagcgcggcggaacctgaggaagaaacgatttatttttacggcgccgccgcatacctgaaggagcaaatcattgacgcttttggttatgctgccggcagccgtttcatgtactcagcgaatctcttttttgatcagcagctgaaaacctgcgggacccgtttgattcacccattatataacgggaatcttcatgttgacgccctgatgaaaacttttgcagacttgtctttcccttcttctctttcattcgaagcatttgaaaaggccaggaatgagctgctgctgaaaatcgaaaagaaattcactgatcccttctcctactcggcggctcgcttggctgaggaggtcttcggaaacccgatgtacggcacaggcatgtttggccggagagacaggataaaggcgattcatcctaaacggtttctcgacgcaacggactttatcgttgatttagtgtcccagcaaaaacagctgaacatattgggacaagtacaagcatgtgatgttcggggacatgccccgcaaacgtccgctgtaacgtccggaagaatacccgtaaaccggcatgtttttgaaacagagacacgcagcgctgcaggtccttccgtcttgacactcggatttgactgcggagagatgaaagatgccagcgattatatcaaaatacagctaatagacggattactgggaaagtacggccattccgctttattcaagcacttcagagagaaggatctggcagtctatcacgttatcacccgttacgatgtcatgaacaatttgctgcttgtttcaatatgtacagatcagcttcatgagaaagacattcccccgcgcgttttggaagctgtctcagcttttcatacagatgagcgggaactagaacaggcaaagcagtttttacgcaatgaattgctgctgcaattcgattctcccgaaggtctattggcctatatgggggtcctgcgccgcttctcctgcacgaaagaagccttgctggatggcatctcagcggttacatgccgtgatgtattgcaattcatagcgaccatcaattatatcggagctcatgtagtaaggggatgaagagatggaaaagaaagccttttttcaacagctggatgaacgaaccgatatcagatacacagacagcggactaaaaatattcagattgaaattcccccgcgcccacctgcggctgtgcaatgtaaaaatcgattttggaagccgggatgtatgtatacgggcagaatccggtgatacactgcttccgtatggcacagcacattttttagagcatcttctcttctggcataacggccgcaatctgtacagtgatttttttgcgcatggcgcgcttttaaacgcattcactacctacaccgataccaatttcatgtttacctcattaccggatcggctcagacaaacgattcccatcctgcttgatgctttatggaaccactcatttgacaagaagattgtcgctcaggaaaaagctgtgattacaagcgaaattcaaacagcacaccttaaccatcagctctcatatcattatcagctgatcagcatgctttctccctcctcaccagctgccgttttccccgcaggcagaatcgaagatattgaggcgctggacatcagtgatttacaaaaagcctataaggctgcctaccaagcccatcggatgacgctgtttttgattgggggctcagaaaatacagaaacgcttttgcctcctcacctccagctggaaaagcgtccggattatcatgctgaaagaaaaatcatcccggcatgccctccagtcctctcacaaaaaatgatgctgggtgatgaggagcggatggaagatacctggaccggattacagatcggcgcacttcccgggcaaaacgatctgttgtcgataaagctttattgggatatcgcggctcgtattctatttcaattagattcaccgttttttcaagagattcagcaaacgtaccgcctggaaatcgatcgcttgtcagccgagacttatatatatgaggatggcggtttcttgatccttcacagtcaagggacccattcttcagcttatatcgatgtggcttcatactatgtcacacagaagaaagaacaggttgccgcctggcttcaatacggcaaggactctttgacagacgcgatcatttatgacagcgattatgtgcgtaaatgcttcgagtgggcagccgagtgtgacaggtgcgattgctcgtttcttgacatgtaccacatcattcaagatatggatgcgcaggttttcttgtctctcattgatgcaatggcatcttctaacaaagcgatcattcacgtttctcagaaagaggcgatcagacaatgaaacaaagcactgtctttacccttttattgctgcttataggtatggcggcttattccttcggctgggttcaggccgttgccgaagccgccgcccaatatgtacagatgatcaacaatgatgctgtgcggctcggactgctggcttgtaccgctgccctcctgatgctgcctgcttttctctatcttcactatgtcacccaatccgtgaaaaacatgacagcagcttttcagaaactcacacagtctcatcaaagctgctgtgactttcagcaacacaacttgtgcagccgatatgcagaagacgtcaaatcgctgcgtgacagctataaaaacgtccgccaaacatacgtgatggctgccgtgttgtgccaagtcatcatattcggctgcatgttcgaaatcgttaaagccgtccctttccgccttcatacgccccctgccttttcaatgggacttgcgatgctactgatcctgtatttattgttttgcatgcgaacgtatttgcggcagcttttccggcacggcagcctgttcagaaaagtgtttgcgggagcactggcagcagccgggatttggtggatgctcagtttctctataagtgaactgctgtttctgattatcctggctgccattcagcaaatcggatcatttatttataaacgattctcttatcacagcaccgcttctcttgatctataaaatagctacatcgcaatcgcagacggacccgcgccaaccggaatcaccgtcacggctgtataatcacttgtgcggtacacggtcacagcattgtcgttgggctgtgccgcataaatatactgtttgtccggcgttacggcgaggtcaaaggcgccggggagagacacgtttgcaatgatcctctgtctggccgtattaactacgtataagttattaatgagaaacggttcactatatggctctagaaaataagctctagtactatcgagagaaaatacaatcgtcctcagcgtttcaaataaacggctgaagtcccctcccctgcttaatggtgacaaactaatctccgttacacctttcggccacagctcaccattcaatacgtacgcaaaatttccagcgtaaggagttgtaattaaactgggaaattcaaatgtatctatgatactttctaccaactgcccagtatttacatcatatttatcaaccgaccaactgcttccattagcggtatagacatactgtccattcggatcaagagcaaagtctaaagcgccgggtatcggaatgacatcaatgaccgattgagaggccgtgttaatcacatatatagatccggcggccatcacgtatgcgaactcatctgttggatcaaattcgatttttctcggccctcctccaacagtaatggtatttatgatggttaatgttttattatcaatcactgagacaaggttggtatttccatggaggacatacgtgaatgctttatcgaaagtaacgcctagattagttggcacgtcagaaaaagggattgtttttacaacagtgtttaaatctgcatcaataaccgaaaccgtgctgtctccagtattggcagtaaacacatacgattgagggtctggtgatggcggtaaaacaagtgtcccggccaccgtaagcggactgccgtagaaaggcggtacaatgagcagatcttccactgttatttgactgaaatcaggacagcggccagactgtgctgcataataaacaacttgatcaatctcttcagtatgaatcacagaaacagccccgtctccttgtccatattgatttcgtacaggcgacacactgacaagaagcgtaatggtcccttgtactctcacagcatatcgaacaccgatatcttctggttccggcccagtctggattaagcaaggctcactgatacaggacaaattgtctgtactccatgtaacagccgctgacgcttcggccgtatcaaccttgaagccctcagggaaatctatcggcacttgaaacggcgcttcccggctaatttcctcatcacaaaaacagaaacaattttcctgtaaagcagaaagatcattctttttcatgatttcacgtccttttagaaatgcacaacatgcagcggttaaatcgtaatggcacccggtgaaaccccaagagatatcacagtttcctcagaataatcatctgtgttgtaaacaatgatgctctgctctataaaacgagttgcatacagaaaatcgccattcggggtaaacgcatagtctgttgctgattgcggaacatttcctataacgcctgctccatttggactgacagaatataaattgccagtgaagccgtcatataaatacacctctgctccactcgtaaacattcgatattccccttcatactccagctcttgggtgctgctgatggtaaacgtatttaaatcaataaccgtcaaataattaaaaaagaattcttgttctaatacataggcataccgctccggccaatttgtttctatggttgatacgataagctctcgttcaattgttcctgtgacttcaccggtagttaggtccactttttgcactattccaaaattcagaacataggcgaataacccattgggatcgattgcaacatcatatccttccacaggaatcgacctatccacagttaacgtatcaattccaatcacataaaccgcagtaccggtgaaaacataagcaaactcatgattagggataaatctaatcaatcgaggcggctgatccagcaatatagttgctgtcactgttaatgtgtcataatcgatgacagaaatcacattattgttgggatgtaagacaaacacagcgcttttatctggcgtaatttcaatacctgccggattgtacggaagagcaatcgttgtcacaacagtatcggtgtttgtatcaatcacagaaactgattgatcatttggattcgctgtaaacgcgtagacgggttccggctccggtacaagcacaattgtccccgtcaccgataaaggactgccgtaaaacggcggaacaacaacaaggttctcaatcgtgatgtcactgatatccgggcaatcatccgattcatcggaataatagacgacttgatcgatttctgcattgtgaatgacggaaacagccccgtccccttgtccatattgatttcggacaggtgagacactgacgagtagcgtaacggttccctgcaggcgcactgcaaattgaacaccgacctcatcaggctcaggccccgtttgaattaagcaacggtcactgacacaagaaaggctgtctgcattccacgtcacgtttgcaacagcttcagccggatcaacgacaaacccttcaggtaattcaatcggtgcttgaaacatggcttctcggcttgcttctccctcacaaaaacataagcactcttcttgttctgctcctgctttttctttaaaggaaagcttgttttttctcattccttcacttccttttcagacatacactgctcacgcagatataacagaatatggaagggtaacgtgtttgcttgtacaaattgctgagggtaaacgcttctttttgaaaatatatctccaaacatgcggtgtaacgaaagaaaaaattgcggtttttttgcgcttctcacaagaatgttgatgataaaatatgacatatatagaattatgaagggagggatttgcaaacgtgacaggtgtcatatcttcttcttccatcggagaaaagattaacgaatggtatatgtacatacgccgattcagcatacccgatgcagaatatttgcgacgagaaatcaagcaagagctggatcaaatggaagaagatcaagaccttcatttgtactattcactgatggagtttcggcacaacctaatgcttgagtaccttgaaccgttagaaaaaatgaggattgaggaacagccgagactgtctgatctgctgcttgagattgataaaaaacaggctcgtttaactggtctgcttgagtactattttaacttcttcagaggcatgtacgagctggaccagcgggaatatctgtcggctattaaatttttcaaaaaggccgaaagcaagctgatattcgttaaggatcggatagagaaagctgagtttttctttaagatgtctgaatcttattactatatgaaacaaacgtatttttcaatggactatgcacggcaagcatatgaaatatacaaagaacatgaagcttataatataagattgctgcagtgtcattctttatttgccaccaattttttagatttaaaacagtatgaggatgccatctcacattttcaaaaagcttattctatggcagaagctgaaaagcagccccaattaatggggagaactttgtacaatatcgggctttgtaaaaacagccaaagccaatatgaggatgccataccttatttcaaaagagcaatagctgtttttgaagaatcaaatattcttccttccttacctcaagcgtattttttaattacacagatccattataaattaggaaaaatagataaagctcatgaatatcatagtaagggaatggcttattcacaaaaggccggagatgtaatatatttatcagagtttgaatttttgaaatctttatacttatcaggcccggatgaagaagcaattcaaggattttttgattttctcgaaagtaaaatgttgtatgctgatcttgaagatttcgctattgatgtggcaaaatattatcatgaacgtaaaaattttcaaaaagcttctgcttattttttgaaggtggaacaagtaaggcaacttattcaaggaggagtgagtttgtatgaaattgaagtctaaactattactctcttgtctggctctaagcactgtgttcgtggcaacaactattgcaaatgcacctacacaccaaattgaagttgcacaacgaggaatgatttaaccgccgtccatcggcggttttttcgtcccctctttaccaaagtctcccaatccatgctatgatcttttcaataatcttgaagagagtggaaatgcagcatgtctctaaaaagtgtgagaacccactttactcaatggaatcgagaaaatgatgtgacggagttcgaaacgtcgagtgcgacagttgaacaggcagctgagacaatcggcgtaagcctgtctagaatcgccaagtccctgtccttcagaggggaaggagatcaggtgattctgattgtggcagccggcgatgccaagatcgacaacaaaaagtccaggcaaacatttggctttaaagcaagaatgctctctcctaatgaggtgctggagcagacaggccatgaaattggaggagtttgcccatttggattggctcatgatcctgaggtttatcttgatgtatcgctgaaacggtttcagactgttttccccgcatgcggcagcagaaactccgctattgaattaacaccgaaagaattatccgaattttctttctcaaaagtgtggattgatgtttgtaaagactgggaataaaaaaacatccagacatcgtctggatgtttacttatttcacaaacccaagcagcatttcacggatgattttgctggctgtgtttgccgtttgctctgagtggtcgtataccggcgcgacttccactaaatcagcgccctttacgtttacctctgaacgcgcaatttcatggaccgatgcaagcagttctttagacgtgatgccgccggcgtcaaccgttcctgtacccggtgcgtgtgcagggtctaatacgtcaatgtcaattgtgacataaaccggacggcccgccagcttcggaagcacctctttcagcggttcaagcacttcaaattttgagatgtgcatgccgttttccttcgcccattcaaactcttctttcatgccggaacggattccgaatgaatacacattgtgcggtccgatcaattctgccgccttacggatcggcgtggagtgagaaagcggttctccctcataatcaacacgaagatctgtatgtgcgtcaaaatggataatcgcaaggtctgggtatttcttgtacatcgctttaatgacaggccatgacacgaggtgctccccgcccatacccattgggaacttccctttttctaaaatgctgtccacgtactcttcaatcatatccaggcttcgctgcggatttccgaacggcagcggaatgtcgccagcgtcaaagaagttcaagtcagccagatcgcggtctaaatatgggctgtattcctcaaggccgattgacacctcacggattctgcttggaccaaagcgtgagcccgggcgatagctgactgtccagtccatcggcatgccgtaaagaatggcgtccgcctcttcccactcgggacggctcgcgataaatacttttcctgaataagcttcatcaaatctcatctataataccctcgctttcctgtaaaaaagcgcaagattcgctcctgcgccataccttcattatttaatcaggtcactcacaaatttcggcagaacaaacgccgctttatgaatatcttttgtgtaatatttcgtctcaatatcgaagaaacggctgtcttccactgcaagcggatcatattttttcgagccaattgtaaatgtccacaaaccgcttggatatgtcggaatgttcgccgtatacagcttcgtaatcgggaagatttccttcacgtcgcgctgtacatttgtgattaattccggtgtaaaccatgggttgtccgtctgcgcaacgaaaataccgtcttctttcagcgcttttgcgattcctgcgtagaatccttttgtaaacaggtttacagccggtccgactggttcagtcgaatctaccatgatgacgtcatattgattttcagattttgcaatgtgcataaatccgtcatctacctgcacgtcaacgcgcggatcatccagtttgcctgcgatagaaggaaggaactttttagagtattcgataaccttgccgtcaatatctacaagtgtcgcttttttcacgcttgggtgcttcaggatttctctgataacgccgccgtcaccgccgccgactacgagaacgtgctccggatttgggtgcgtgaataatgggacatgcgccaccatttcgtgataaacgaattcgtctttttcagatgtcatcaccatgccgtccaaaaaaagcatgttgccgaactcttctgtttccaccatttctaaatgctgaaactccgtttgttctgtatgtaacgtcttgttaaccttcatcgtaatgccaaagtttttcgtctgcttctctgtgtaccaaagttcgctcaattgtcatctccctttcgaggctgtattcatttattgtaagcgtcttatcagcttttattctcggttgaaatctcattttcacctaaggaaaaagtatagaggatggcggggaaaaagtaaagatgcgtcctgttctgcgatgtttaaaaacgatctttttttctcataatagtagaaacataaaaaaagggggaacccgttgtggatgcaatgacaaataaacggctgagactgacgctgaaaaccgttcgcgcctttatctttttaggggcttttgcggccttggcggcagctgctgtgtttatgactgtcattttgatagccaaataccagggcgctccctcggtgcaagtgccgcaatccacgattttgtacgcgagtgacggctcaaagctcggggaaacgaactacggcgaaaagcgctattgggtccccttaaaggacatgaatccgacgatcgtaaaagcgacagtggcgattgaagaccagaatttctacgatcatcacggctttgattataaacgcatggccggcgcggcgcttgctgacctgaaagcatttgccaaggttcagggtgcaagcaccatcacccagcaatatgcgagaaacttataccttgaacacgacaaaacgtggaaacggaaatggaatgaggcgttctacacgatccgtctggaacaaaactattctaaggacgagatattagaaggctatttaaatacgatttactacggccacggcgcctacggcattgaagcagcttcccgcctgtatttcggcaagcatgccaaaaacctgacggatgcggaggcggcgcttttggcaggaatcccgaaaggcccttccggctattcaccgtatgtcaatgagacgaaggccaaggaacgccagaaaacgattgtgcggatgatggaaaagcagcagatgatcagccaaaagaaagcggatgaattgatcaaggaacctctttcctatcagcctttgaataaacaagtttccaagagaaaggctccttatttctacgacaatgcgatgagagagctggaaaaaaagctcggcatgacacgggagcaaattgaaacgagcgggttaaacgtctatacaacggtagataaacggatgcagcgcatcgccgaggagaccattaccgaaacggttaacgcgggctctgacattcaagtcgggttttcagccattgatccccgcaccggaaacgttctcgcccttgtcggcggcagggattatcaaaaaagcccgtttgaccggacgacacaggcgaagcgccagcctgcttcgacgatcaagccgttgctgtactataaagcgattcagagcggatttacgccagtcactttgatgaaaagcgaagaaaccgagtttcaaattgatgcaaagggagaaacctattctccaagcaactataacggatactatgccaacaagccgattacgcttctgcaggcgctggcgctttccgacaatatttacgctgtgaaaacgcatctttttctcggcacgaacaaacttgtaaagacggcaaaggaattcggcattaccgcccatcttcaagcactgccgtccctggcactcggcaccgaacccgtacgtccgattgagatggtcaacgcctatgccatgctcgcaaatggcggaaagaaaatcgaaccgacttttatttcaagagtaacggacgcagccggccacgtgctgtacgaaaacccgaatcagcataaacaggtgcttgatgaaaaagccgcttttgtcacagcgagtatgatgacaggcatgtttgatatcgatttaaatggatatacgtcggttacggggcgaacgatagccaaccgcctgacaagaacgtatgccggaaaatcaggaaccaccagcgcagacagctggatgatcggcttcaatccgaagctggccgccggtgtttggaccggctatgacaaaaacagcaccatcgactcggtcgaagaaaaaagctatgctaaaaccatttgggcggacttcatggaggacgcgctcaaaggcgaaccggaaaccgcgttcaagccgccaaaaggcgtaaccggtgtgtacattgatccggaaacaggctactcatcaggtcccggctgcgccgctaagcattacacatattttgtgaaagggacagaacccgcaaacgtgtgctacggggcagaacccgcaaaacaaacaaaagaccggcttccatccaaagaaaagcccgcttccgagaaaaagtggtgggacaaatggctggggcgacatcattgaaaataacccggctcctcggaggccgggttattcgtatggttccttcataatcgatggaagaatgttagacaatcgagctgaacaatcagttttgggataaagtggtgaatttctcatttcttcggcgctggctttcatctcccagtcgccgactcatatccccctaaaaatgaaaaaccccgagtcttgtttcggctcgggattttccatgtcctatttctgtatcaccagtttactcaatgtttacgaaaaatatctcaaatactttaaaagttcacaaaaaattcataaattaattgttttctggaagcaggctcgtttttaactcatctgaggaacggtcccataggccctgatcatgctttttcagaaattcgcctagtacacgcttcgagctgtcgtccattttatcaacgatgattttccgtttcatggatttatccatcagattcacatgctcaggcagtgacttgtagcctcttctgatgcttctgtcgaccgtcatttcacaggctgtcacaccagcgtaataaggcccctcttcttttctgtcaatcgttacccacacaagccagtatggttttccgttcggcacttcttctttattcgggagaaatttaattcctttttcaacggtgctgcgggcatgcatagcgccgatgtctacgaacgcttctttttcctctacatcaacgaatacgggagaaatgttatcaaggctgagtgcccctacgccaaaaccgccgtgtccgtctgtcggatcacttttgataatattaaacccgattgattttttctttttttcttccatgaagttctacctcctacaaaagcggttgaaatatcgctgaaaacagctttaaaatcgaatctcttcctgcattgagcatcggccacagcacgtaagatcctagcggtgtcacaaacagcaccaaaaatacgataaagccgtagctctccgcctgcgtcattttggcacgcacgcccggcggaacgagatcttctataattcgatagccatcgagcggaggaagcggcagcagattaaataaaaacaagacaagattcagctgtatccaaatagaaaaaaactgatccagccccgtgctgaacgccgcaagcatttccattccgtacgcatgcatcaacactaacaaaaagaaaccaataaacgcaagaatcaggttactgacgggcccggctatagatacgagcacaccagcaagccggggtttcttaaagaaacggcgattcacgggaatggggcgcgcccacccgaatccggccaccagaatcaaaatggttccgaacggatcaaggtgtttaatgggattcagcgtcagtcttccttgttttttcgccgtatcgtcaccgaatttgtatgcgacataagcgtgggcaagctcgtgcatcgtaaacgacacaattagcgtgatgacgaggtatggcattaaagataacggataatataaaaaacggtccaagtgagatatccctctttctcaaaatgcaagaatttactttattcagtatactataagaagcctctttttctaaagagaggaaacgagataaaggaggattcagcacccatgccatacgtaactgtcaaaatgctcgaaggccgtacagacgagcaaaaacgcaatcttgtcgagaaagtaacagaagccgtaaaggaaacaaccggtgcttctgaagaaaaaattgttgtctttatagaagaaatgagaaaagaccattatgccgtcgcaggcaaacgcctgagcgatatggaataatctctataaagccggcgcttcgcgcaccggcttttattatccctattgagccagcttcgcaataatcgccaagaacgtctttttctcttcggctgttaaacgttcaaacatgccatcaatcagctgctggcggttttcgatcatttgttcagccgctccccggcccgattcagaaagagtaatccatacagtgcggcggtcattgttatttctggatctctcaataaacccttcctgctctaaatgattcagagctgtggtcgtggcagagggagacagtgtgacctccttcaaaatatcctttatggtgcagctcccatgtctgtatatgatccgcagaataaaccctcttacattattcacgtgtttcggaacggtggcttcatctaattgcttcgtgcttttcaaatactttgtaagtgcgtgatccagcaaatttgcttccagtttgtcatggtccatgtcaatttccccatttcgagatgcattcataacatacgaacgatatgatttacttattattttactgattccgaatagggaaagtcaaaaaagcaaaatgtgaattcacagcttttatcctacatgcctcgattttccacctgtttcacaagtttatctttaaaagtttggaaaggaacgtgttcattctgctgatgtccgaatcggcggacgtttaccgcattctcctgctcctcatgatctccaagcaccagcacgtacggaattttttgcacctgcgattctctgattttatagccgagcttctcattgcgctcatcaatgccggctcttatccccgcctgcttcagctccgcctgcacttttctgcaatagtctaagtgaacgtgcgaaaccggtatgatttgaacctggatcggtgcgagccagactggaaaagccccaccgtaatgctcgatcaaaatgccgaagaaacggtcgattgagccgaaaaccgctctgtggatgacaacgggacgaaccttctcattgagttcgttgatatatgttaaatcaaatttttccggcatttgaaaatcaagctgaattgtcgcgcattggtggctccgtttcagggcatcttttatatggaaatcaattttcggcccgtaaaacgccccatcgccttcattgatctcataagagaggccaagctcctcaaggacgcgtgctaaggcacgttccgacgcttcccaaaggctgtcatcgcctaatgaatcctccgggcgagtcgaaagctcaacagaatactcgaaaccaaatgtccgatatacctcatcaatcagccgaatcgcttctttgatctcactctcaatctgatcctcccgaacgaaaatatgggcgtcatcctgacagaacgtccgaacgcgaagcattccgtttaaagcgccgctgtattcatggcggtgcacctgtccgaattccgccatgcgaatcggcagatcccgataagaatacaggctgtttttaaagatgagcatgtggccggggcaattcatcggcttcattgcgaatcttgtatcatccacttctgaaaagtacatattgtcgcgataatggtcccaatggcctgactgctcccataaccgctgattcatcataaacggcgtacgcacctcatcgtagccggcatttgtttgcagctcacgcgagaagcgctccagctcattgcggacaatctgccctttcggcaaataaaacggcatccccggcgcttcttcagaaaacataaacagccctaactgtttgccgagcttgcgatggtctcgttttgccgcttcttctagcatatgcaggtgcgcatccaaatcttttttcttttgaaacgcaaccccgtacacccgctgcaggacttcatttttgctgtctccgcgccaataagcgcctgatactcttgtcagtttgaacgccttgatcatccctgtagaaggaagatgcggccctcggcacaggtcaacgaattccccttgctggtacagtgtgatatcctccccgcgcggaatatcctttaaaatctcaagcttgagccgctcgtctttttgtgcaaacagctcttcagcttcttcgtaagaaacctctatacgtttgatttcaaggttctcatttattatgtttttcatttctttttcgatggcctctaagtctcctgatgccaagcttttccccagcttcatgtcatagtagaagccgtctaaaatcacaggccctacccccaatgacacttcgccgtacagccgttttactgcttgggccagcacgtgcgctgttgtgtggcgaagcacctgcaagccttcttgtgaatcgagtgtgacaatcgaaagctcagcatcctcctccagcttgaaactgagatcaacaagcttgccgttgacctgacctgcggccgccttcttttgcagactggaactgatcgaaccagccgcttctttgattgtgatgcctttcggatattcctggatctgtccgtccggaagctgaatgtgtacatgtttgctcattttagaacactccttattcattgttgtatataaaaaaacacacccgtcccgcagatagggacgagtgtgtgattaacccgtggttccacccaagttcccgacaaatactatgttgtcggctcggtgctgtaacgcagcatagacggcattggttacttcagttccccaatgctgctccaaggcggtaaatgatattcctaagctgggaagctctcacctttccttccctctctgaaaaccgtaactatcattcatgtccttttcatcgcatgtattcaattcataaaaaaacacacccgtcccacagatagggacgagtgtgtgattaacccgtggttccacccaagttcccgacaaatactatgttgtcggctcggtgctgtaacgcagcatagacggcattggttacttcagttccccaatgctgctccaaggcggtaaatgatattcctaagctgggaagctctcacctttccttccctctctgaaaaccgtaactatcattcatgtccttttcttcgcatgtattcaattcaaataaaaaaacacacccatccctctaaaagggacgaatgtgttgatcatccgtggttccacccaaattcccgatcaattacacatgatgatcggcttaaagatgctgtaacgcagcatgacggtatcagatacttgttttccctgatacggctcaaaggcggtaagctgctttccctgcgttaggaagatctcagctgtccttccctctctggaaaccgtaaaaagcatctcgtgtccttatcagtgcctgttgtttcaataattttttatatcttactatatattcccacaaagcgcaatcagtgatttacattttttctgacgcggcagtcccgttatgggcagccagaaacagccatacaagcaatgcagcgaggctgtatgccgctcccatcatcaaaaacgcaaacccggcaccagcataccaagtggcggacagatgaatgatcaccccggttatcgctacgccgaccaaggctccgatttgccggtttgcatttaacgccgcaccggcgatattcgtatgtctttgcccggcagcctgcatgatcacagttgtcatggcaggaactgtaataccggtacagaggttcataacagacatcaacaccgccagctgccaataaggaaaatccggagaaatcagcacaaacaacagcaatgcaatgatacagctgaccgccattgatacaaacataagctgaccggcttcaaaccgattcgccagacgggcaaacagcagattgccgatcacgaagaccgccatcatcggcagcagctccactccagccataaaggaacttgcccctcctgcttcctgcaaaaaaaggctgagcataaacatgccgccaaaaagggcgaaattcagcaaaaacccgataaattgggcagctgagaagcggccgtttttgtataaggacgccggcaggatgggtgtttttgcagaaatttcccgcagcaaaaacagcacaaatgccaaaaccgctgcagtaaatgctacaagaatcactggcgagcgccagcccgctgaaggcccctgtatcaaagcataggaaagaaacccgagagccatcatgccaagcagatgcccgatgatgttcacgcggctgcttttcccaggaacgcggctgaggattcggtaagctgaaatgagcgcagcagcccctattggcacattgatcagaaaaatactctgccagcccgccaactgtaccagcacgcccccgataaaaggcccaagggctgaagcggcggaaacaagcgcggcccacagtccaaacattctcgcccgcgcccgctcatcaaggtaagaggcagccaaaaggctgagtgagcttggcataaacaaagctgccccaattccctgtatgagacgtccggcaatcagcatctgcccatttatagatgcagcgcatagacaggaggccataacaaaaacggctagacccaagatatagatcgtcttcgagccgaaacggtcagccaaggctccgcccgccagcagaagcgacgcaaaagtaagaatgtacccgtccacaacccacgttacacctgaaagtgacattgaaagagtgtttttcatatcagccatcgccacattcacaacggtcacatcaagagttgccatgaggaaaccaagtgcgagcacgatcagcacggatatgcctgttgatgatgttgattcttgtatagacccgctatttttcattacaattgccctttcacttgcttgattacccaatcatctattttttcaagatcatacaattccccgactctgtccataacatgctgcaaggattcttctctcataagattggaccatttatcctcgatttccgccatgactgtctccagcacacagtgactttcaccctcaaatacagattgcagcaagcctttcccctgatacatcgaacctctgccttcgaccgcttgataaacatcataaagcgtaatgtcagccaaaggcttcgtcagggtaaaaccgcccttcgtccctggtaaggattctgccaaaccggcttgaaccaatgttctcatcagcttcttcaagtaagacggagacacgcgcaatcgctggcttatagcctctgacgtcaaagaagcctgtaccggcagccgtgacagtaacagcagcacagaaaccgcctgctccattcctgatttcattttcatcctattcactcctgattcattatggataactattatccataatgaatctcttagcagcttttgtcaataaaaaaagcaaaagaaacggatcatttcttttgcttggtatggttaacaaatctgcttcagttcctctatgtattgaagcgcttcgtcatattcttcatttgtatatttttgcttgcttttgatggtaaagactttttctttcttttcctcatcctcaagcccgtcaaagtaaaggatcgtggaaaccagctctaaaaaccgtgatgaacggctgtttacactgtcgatatagcctttcatatccggcatgtccagatcagcatggtctaaaaatgcggagcctgtctcagtcagcgaataccggtattgaaagtagccgccctttttttccttcacctcatgcagaaatccaaggttgcacagctcttcaatctggagcgtcagttcctctgaatatggtccgtaaaagtgaaaatcatatttctcatagaaaggaaactgcattttcttggcgatataaatcattttctgcagcttctttcgcccgatgatttctccagaatccgagaacaccttcatcagttttgcatgttctttcaacaaattcccgacatctcctttttccttctttccaatttctatgtcagtcccagcagctgccggattttcattttcgcttccggatgtttagtgccgtcacaaatcaagtcctttggatagtacagcttgtggtccgtccgccgtttacctgagatggattccacaatagccgactgtctggacagctctttaatttggccgttttgcgtcaagagatggatcggcagacgctcctcttcctctcctggtcggtaaaaatcgtatggcagatctgatgaagaatcaacgaccaaataatagctcggatcgatccccgcctctttgaacaatgaagtcagctcaaaataagccgacatttcttcattcggattgaattcaacgtattggaaaagctggcggttaatgaatctgcggcacaagtcggataaaatcgcgtcttcttcatcctcccaggcctggaagtaatacaaaataatagattcatccagctttacataatcctccagtgtcaattttccttcaaaaatagaatagaaatgaaccggagcgtgagtgaagacatagccttcatcgtgcagctgcttcgccctgtgaagaatcttcgttaaaatgacctctgcacttctagtcacaggatggaagtagacctgccagtacatttggtaacggctcatgatatagtcttcgacagcgtgcattccgctttctttaatgacgatctgatcctcgcgcggccgcatcacccgaagaatccgctccatatcaaaatggccgtagctgacgcccgtataatatgcgtcgcgctggaggtaatccatgcggtctgcgtcaatctgactcgaaatcaggctgaccacttgcttgtttttatatgttttggcaatgacttcagcaacatcctgagggaaacccgggctcacctttctgagcacctgattaacctccgtgtctcccaaaatgatacctcttgtaaaatcctcgtggtcaaggtgaaagaccttttcaaatgaatgcgagaacggcccgtgcccgaggtcatgaagcagcgccgcggccaaacagagttcgcgctcactgtcatcccattcagggcggcctttaaagacgtcatcaaccattcttctgacaatttcatagacaccgagagaatggttgaaccggctgtgctcagccccatggaacgtcaaataggtcgttccgagctgcttaattctgcggagacgctgaaattcacgggttccgatcaaatcccatatcagcttgtcccgaacatgaacatagcggtgcaccggatctttaaacactttttcttctgataattttccatttggatacgccatcgtcattccctcttttttttagccgtgtttctattatatcgactctattctttgaaaacatccttgaatttgcccggcgatttgttccatcttcatgaaaaacacatcttgtgaagcaaaaaagcctgacctgagggccgaggctaagaaaaaatatgtttttacttttttattttcttttttactttgtcaatcagctcatcctctgtcggagctgacagcgggcgattgttcacaaaagcaaatgattttttccgtccgggcccgcaataagattggcatcctacctcaacctttgcgtccgggtccacttctttcaaacgcggcagcaatgttttgatattagtggcttggcaatcatcacacactcgaaattcattagccatgacgtacgcttcccttcatttctatgttcatctatgtgaataacctaaaatcacgtttcaaaaaaaatcacatcacacttcattttacaaggattcgactgttcctgcaagccgctccatccttcgtatctcctattctttcagccaatttgtataaatattttccaacctggacattctaataccatgaaaagaaaaatgggagttgagataaatgacaaaacagcgacaagacgcttggtcagaggaaaacgatctgcttttagccgaaacagtgcttcggcatgtgagggagggcagcactcagctgaacgcctttgaagaagtcggcgataaattaaaccggacatccgcagcctgcggattcagatggaacgcagtggtccgccatcaatatgaaaaagcgcttcagcttgcgaagaaacaacgaaaacagcggatgagagcgctcggaaacgggcagcccgcgaaaaaaagattattatatcagcctcctgccgttgatcctgaaatcattcaagaaaccgctgcagaagagccggttaaaacggaaacaccatctgtcgaaaatgagcaacctttaatgtctggcgaacacatgccttttgttgatgaaagctttaaggaagagttagctagtctatcacacttattgtctcctcaaacgcctgcagctgcgcctgagatgacgatgaatgatgtgatccgcttcctgcagaattacgaaggcaatcacgagcaatcatcagcattaaaaatggaaaacgagcgtttaaagaaagaaaatcaggaattgcaaaacaaaacagagcagctagaggcagaagttcaaaagcttgaaaaagaccaaaaaacgatccaagaagattatgaaaccttggtgaaaattatgaacagagccagaaagctagttttatttgaagaagatgaacatgcctctccgtccttcaaaatggaccggaacggcaatttagaaaaattagcggaatgacatagaaaaatcccaaaacgggcagctgttttgggattttcgccatgtgcaaaatccccttttctattgagaaaagagaatttcctcattttgcagccggatcagctattcttgtaaaatgaggccaagcttatgtgaatctattaagacatgtgagctgcctcggccgttttttgtttccgaggcgcagcagaaatgaccaaaagccccagcatcataagcgcaatgcccagccacgaggaaggcgaaagcatttcccctatgaaaaacacgccaagcaatgaagccgtcagcggttcagctaaagacagcgtgaccgccgccgaggccggaaccccggtaagccctttcgcaaacaaaaagtatgcggcacatgttgcaattaacccgatgtaaaggcttgttcccagtcctctaggggtcaatatccacgagatatctaactgccataatagcggcgtcagcaagatggcgctgatcatgaatacaacggcggaggtcgctcgcggaggctgggttttcatcatcgctttactgatgagcgtatagcctgcaaaagaagcacccgctccaagcgccataagaacaccagccacatcaatccgaacattggaactgtcggaaaacagaagccagcaacccgctaaagccagcacagtcgcaatccaccaggagtttcgcgggcgtttcttcaatacagcccattcgagggtcccggcaatgataggcgcactgccgatggcaatcacagttcccactgcaattcccgtttctttaaccgctgtgaaaaacagcggctggtaacacgccatacaaacagcggctaaaaatacgagcggccatgcccaatttttcacgtgaagctcccggctgatccaaaccgcaagcagcatggcgcttcctcctattaataacctgaacgctccaaatgccagcggtgtggcgctttctggagccaatgcctgaacggttcccgtggtcccccagaaaaaagccgcaatcaatacaaaaaggctgtaaatattccccttcatctgcctctcccctttaatatggatgctgatgtcattttatcgtttttctttttgtcgtggttatctgtatgtaagaaggacttatctgaaaataagattattgaggtaaaatgccgcttgagataaaaaatgcatgccggcatatacagccggcatgcgaagaacgttcacccaaatacctttgcattccgctcagccatccggacgaggtttttctcaaattccatttcctcatcaatggacagtccagctgaataaagatgggtgcttaacgcttttaattccgtcaataaagcgaacattaagtcttgtacggagatgtctttttgaagaagctcacttaaggacgccatcgtttccggacgtatttccggatagacgccttttttatcgttttgtttgtctttcagcgccgcttgatagaatcgtctgatcaagtcggccctttcactgccgcttttatctgcacagagataaatttgaacagcgactccgccgcgaacgcgtctctgagagatgccggcgaactttttgccatttatactgaggtcatagctgccgggacaataagacccttcaatttcataggcttcgatctttgcgttgtacggtctcagcattcgtctcatcagctcgaccatcgcttcatatcctttgtctatatcgatgcctttcttttcgtcctcgaatatgagagagatatttaaaacaccgtcatccaatacgacggcaagaccgccggaattgcgtacgatcacacggtatccttcgctctccagcaaggagataccatcctgcaaaaacgggaggcgtgtatcctgtattccaaggacaattgtatcgtggtgcacccatgagcgcgctgtcgccggcgacacgccttttccgacggacatgcatagcgtatcatccattgcgaaggattgcttcgcatcaaataaagggccgagactggattggtcaatgactctccatttcggctgcatcagtaaatcaatcggttggtttgccatctatgtaaaaccctttcatgttaggcttattgaacgaaaactattatatcatttcagcagctgtgattgataattgcttttcagcatcgtaataaaaatttctttattttttgtattctccatgagaggagaatgaatgtaagacagcttgcgctttaacgagaaattattaatatgcagaattgaaatttcgcggtggatcaaatccttacgcagcacgcttctggatagaaccgaaagtcccatgccgttaatcaccgcttcctttacaccttgattgctgctgatggtaaacattgatttcggccgaagtccatttgaactgagtacatgatcgagatattctctcgtcccggagcctttctctcttgtcacccacgcttcgttctgcaaatcgctgatcgaaatctctttccgcccggcgagcggatgctgatttggagcggcaatgcacatttcatcctccatgaacggttcaatttccagctcattctcgtttgtatgtccttcaatcagcccgatatcagcctgaagcatccgcacacgctcgctgacctcctctgtattgccaatcatgacatctagattcagctctggatacagcttttgcagctgggccaatagcggcggaagaatatactcaccgattgtaaagcttgcagctattttcaattcacccttcacatagtgatgatgcgcatagatttcagccttggcttgttcgtagagaaacaccatttgctttgctctttgatataaaatgtctcctgtcggcgttgtcgtaaagtgttttggcgacctgttcagaagagccgtttgaaattctttctcaagatttttgatatgcagactgacgctgggctgggagatcatcagcttttccgccgcttttgtgaagtttttttcttctaccaccgctataaacgttttcagcacgtcgtaatacaaaaaccccacccctgtcattaatgaaatatatggttatgattagttttctttattgtactcatatcatccgtcttggtaaagaagggctatacagaagcgcaaaaaaggcagccctcggtcgagagctgccattgtcttcaattttattacagtgcttgcgccgctgtaattaatgcgagattgtaaacatcttcagcgttacatcctcttgaaaggtcgtttacaggcatatttaaaccttgcaggattggtcctaccgcttcaaagttgcccaaacgctgagcgattttatagccgatgtttcctgcttcaagacttgggaatacgaatacgttagcgtcccctttgatctcggaatccggcgcttttttctcagctacagatggaacaaatgcagcatcaaattggaattcgccgtcaagtgtcagttcaggcgctttttctttcgcgattttcactgcatccgctactttttctgtttcatcagattttgctgagccttttgtagagaagctgagcattgccacgcgaggctcaatgtcgaacatttttgccgtattggcactttcgatcgcaatctcggcaagatcttggctgtcaggtgcaatgttgatcgcgcaatctgcgaatacgtattgctcttctccgcgagccatgatgaacacgcctgaagtctttttcacgccttcttttgttttgatgatttgaagagccgggcggacagtgtcagcagttgagtgagcagctccgcttacaagtccgtctgcaagtcctttatacaccagcattgtaccgaagtagttctcgtctaataatgctttacgagcctgttcttcagtcgctttgcctttgcggcgttctacgaatgcttgtacaaggtcttccatgccttcatatgtatgaggatcataaatcttaacgccgcccagcgtaaggttcaattcttttgcttttgcttggatctcattttcattgccgatcacaatcggattcagcactttgtttcctgcaagcttgctgaccgcttctaaaatacgctcgtctaagccttcaggaaatacaattttaacgtcttttccagctactttttcttgcactgttgaaaataaatctgccacaataaaacctcctcaaaaagttacaaaaacgctttcttttactagcatactcttcttccaatcaaattcaaacagccaactttcattatagcgctttcataaaaaaatcttatttttctaactaatttaagtgactcaatcttcccttataggttcttctattttgatggagttatacggaagggatgttcaaggtttctccacagtagaatcggataaactatggtatagtgaaggcaatcatgaaaagataatgggagtgaagataaatgagtgaacagcaaatgacgaatgaagcggcaaaaacgcttgacggctggtatgcgcttcatgatttccgcacaatggattgggcttcctggaagcttctgtccagtgatgagcgccaatctatcatacatgaattcaccgggttgcttgaaaaatggggcgtagcccaaaaagaaggaaaaggatcgcaaactctttacagcatcgtcggccaaaaagctgattttatgctgatgatccttcgtcctacaatggaagaattaaatcaaattgagcttgaattcaacaaatcaagacttgctgagttcaccattccggcatactcctacgtatcagtggtagagctgagcaactacttggcaagcggtgacggcgatccttatgaaaatccgcatgtgcgcgctcgcctttaccctgaactgccggaatctaaatatgtatgcttctatccaatggataaaagaagatctggcaacgacaactggtatatgctttcaatggaagaacgcagaaacttgatgagaagccacggtttaatcggccgcagctatgcgggcaaagtcaaacagatcatcaccggctctgtcggctttgacgattacgagtggggcgttacattatttagcgatgatgtccttcaattcaagaagctagtgtacgaaatgcgttttgacgaagtcagcgctcgctatggcgaatttggttcattctttgtcggcaatcacctttcgcttgatacacttcctcaattcttatatgtataatatcccctcccgccctatccggcgggagtttttcaattctcctttatcagaatttaaataaaatttgctattttcttcgttttttcttacgatgtagataataatccatttttttcaaaggggtgcagttatttgtcaaaacgaaccgcatttgttatgggagccagtcaagggatcgggaaagcaatcgctctgaaattagcagaccagcacttttccctcgtcattaattcgcgaaatttggataatattgaatctgtcaaagaagacattttggccaagcatcctgaggcgagcgtcattgtccttgcgggcgatatgtctgaccagcatacgagagcgggcatttttcagaaaatcgaatctcaatgcggacggcttgatgttctgattaataatatcccgggcggcgcgcctgacacatttgataactgcaatatagaggatatgacggccacgttcactcaaaagaccgttgcctatattgacgcaatcaagcgtgcttcctcactgatgaaacaaaacgagtttggcagaatcatcaacattgtcggaaatctgtggaaagaacccggcgccaacatgttcacaaacagtatgatgaatgccgctttaattaacgccagtaaaaatatttccatccagcttgctcctcacaacattactgtcaactgtctgaatcctggttttatcgctacagaccgttatcatcaatttgtggaaaatgtgatgaaaaagaacagcatatccaaacagaaagcagaagaacagattgcttccgggattccgatgaaacgggtcggatcagccgaagaaaccgcagcgctcgccgcatttcttgcctctgaggaagcctcctacatcacgggacagcaaatttccgctgacggcggcagcatgaaaagcatataaaaacatcccgctttttagcgggatgtttcttgtaatgacccgaacggcaggttcagcttttgaatccgcgtgacaaattcccgcagatcctcctgcttcgacaccattgagattctgacatgcctttttccgttgcttccaaaaatttcgcccggtgtgactacgacatgggcatgctccagcaagtaatcggaaaattggtgagatgtctcaaacgtattcggaatttcagcccatacgtaaaaggttccttttggcttttccatcttccagcccagttccttttcacaaagcgccgtaaaaaagtcaattcgttccttataaattcgtttcaacgattccgtatgctccggatctccagaaagcgccgcactcgctgcctgctgcagcccgccgaacatgccgacaaatacatgatcctgaaattcattgacggcctgaatgattttttcgttcccaaccgcaaacgccattctccagccggccatgttaaatgtttttgaaaatgaataaagctctgctccgacagttttggcatcctctgcctcaagaaagctggccggtttttgatcgaattcaaacgccccgtatgcaaaatcatgaatcaaatggatgttatgctctttcgcaaaagcagcagcttttgcataaaaagccgcatcagccacagctccagtggggttgttcggatagtttaaaaacataagcttcgctttttccagcacggctggatcaatcttttcaaaatccggcagatagccattttcttcatacagcggcatttcgtaaagctcagctcgcgccatcgtaatccctgataaatattcaggatagcctggattcgggactaaagcgatgtctcccggattgagcaggcattgtgtcagcacatacaatccggctttcccgcctccgaaaagcgcgacttccgtttcaggattgattgtcactccgtattcccttttatagaaagcggcgatcgcttcctttaaaaaaggatagcccctgaaagggccgtatccatgaaacgaaggattcagagaagcctcccgcaaagcctcgacaatatgcggcggagtgggaaggtcagggttcccctgtccgagattaatgatatgggctcccgttttttccatttcctttaccttttgaaaaacgagagaaaactcctgccttggaagtgtcttgatgacatcggacggtgttatttccatctaaaagactcctttttgctccgttttgttatcccgttccaaaaacgatttgttgacgagcttcgtatgcaaaaacaaaccgcatacgatcacgacaatcagccccataatgaccggagcgcttaggatgttaatgaacattgaaccaatagaaatgcataatccgatagacgcttcggccactgaaaaaatgcgcccttgaatctggtttgccgcattttcctgaaccttcacttttgcaagcacttccccgtattccatcgcgatgaaaaagaggatcgccgcgatgacagaaacagcgaatatcggtgtgaataaaaacagcgccagcgagacaatggataaaacggtaaagtacgtcaggcctctattgttgttaaagccccatttgctgacaagcgccgctccgataaagccgccgaagccgatgcagaacgtgagaataaagttgccgatttccccgtcacccagaaagcggctgacaatcggaaaatagctgtacacaactccccacagcaaagccattgtaatcatcgtaaacatggcgtttaatacgaatgaattggttttgatttccttgagtccttccttaaaagactgaaaggcctctttaatgttttcagattgaatcggcacaaattgcagcttgatgcggctgataaaaaatgccgaaaccaagtatgtcacaccgttaaaggcaacagccagctctacagatccgcctaacagaaagagccctccggcagccgccccgacgataatggagatggttgtcgcttttgcaaataacgtgttgatgcttttaatatctgattccaaggacgacatgacagcgagacgggcgggattaaaaaacacgccgcttccataagtaataaacagcagggccagaaaaatcagcggatactcgccttttggaagaaatgtgagccccaaaaagatgatgcctctgatgatatccgtccacagcatgatcttaattctgtctaaccggtcgaccagaacacccaaaaacggctgaaacaccatcggaatgcttctgaccacgatgaccccggacgtcacccaataatcgtgataatatgtagacaaaatgagcagggcagggagaacacaatagtctcccatgaacgatagcgcctgcccgtaaagcaagtatttagagttgggtttcagctgtttcatactggcagcacatactttgccgtcagcttcgcatgctgctgaatttgtctgattgattcagccacatcctgtgaattactgcctttcagttcaaatgcagcaatggaattgaaagcttcaaacaatgtcaaatcaactgaagtgcctggtgctgcggccgaaaaagaaacgatttcagtatccccttttaaaagcccgtccggaatatcgatcgcttcaatgaccaaatcctcagcagtttcaggaatttggccattttgtttgaaatgctgcgggtacaaatggcagtcggcaacataataaggctcttgatccaataatccgtccggcagatcggcgtcttttccgaaacagaggacatctaataataattgcgccatatcaaggccaaagacctttttaatattggggatcatattccagccggcaaatctggctgccgactctattaaacccggttctctgtttttcattagcttgatctctgtatgtgttgcgcaattttgcagtccaagcccttcatttgcctttttggcagcttcgacaattttcttttttgcctcttcatccagaatggacggcgtaatgtgggatgtctctgtaaacccgatttgcggcgttttatcatgaatggcgatcgggaaatactcaccgtcagccatgatgccttctatactgatatagtcggagtacccttctgtttgataccagtctccgtactcaccctgtaaaaattcttcagcgataaacggcgcttcaaacgtaaccgcctttggcacgttaattgatttcagatagtcattgactctgttaaattcatcttctgccgtctcagtgtccgtaatcagcgttacaccgatagaactcgctaagtatgtaggctttaagataagaggtgtgccgatctcttcaagagcagcacggaaatcttcaagagttgtgactcgtttgtttttgatcgatttgactccggccttattaaaagcgtccctcattttatttttatctctggcattttcggctgcctgcacgccggcacctctcaagcccagacgttcacaggctttcgccatcggagcaatgaataattcattgtttgttgtgatggcatccgccccaaacatttcggcaaccttgacgatttgctcgacgacctcttcctcaggcttgttatgatcttcatgcgcccaataaatggaatcagggtgttcaaaatcagctaaactcttaaaatagtctttatcttttatgaccgcgaccgagtatttttcaatcaatgctgcatgggaggctgtaattgcaaaaggtcttggaataaagctgaccaggttatatttttcagcagcgcttttataaaacatgtgcggcgggcagcctccaagatcagcgatgaccaatactgtttttctctccatatgtaaaacactccttctctattgtgcggtgtatcctccgtctgcggtgatggcgcttccggtcatatagcttgataaatccgaggctaaaaacagcatcacatttgcgatttcttcaggtttcccaagcctcagcagcggatttaccttcgctttttcttttttaatctcttcaagtgtgccttcattattttcaaggaatgatttttcattcagcggtgtgtcgatgatccccgggcatacgcagttcacccgaatttgatgtttcgcataatcaacggccattgatttagtcagctgcaaaaccccgcctttgctggcgttataagcaggaatatcaggccatgccacgagtccgccgacagagcacgtattaatgatgttgcccttgccggcggccagcatatgcttgagtgcatgtttgctcattaaaaacatgccggtcaaattgacttgcagcaccttgttccaatcgctgagctccatctcgtgaataggcgccacgatttcgatgcctgcattattaatcaagacatcgagcccgccaaatgtatgaaccgccgattcaactgcgtgctggcaggcagcttcgtctgtgatgtccgtttgcacaaagtgcagcctgtcattattttcttttcgtaccattgcttctccttgcgcttcatcaatatccgccacaaccacattggcctgctggcccaaaaaagcctgaaccgcagcataaccaatgcctgatgcgcctcctgtgatgaggacggttttatcggtgaggttcatgatcattcatccgccttcattttttttgcttttgccctgttatagcgcggcgggaagaagatattaatcgattttgattctttttctgaacggttgatggcaccatgatcttcgcgaggctcacagaaataggctgtgccgaatttcatctcgactgtgcagccttcgaccgtcatgtcatagccgccgccgatgcagatgcctatttgttcattccgatgtttatggaaaggcatttctccgccatttccagggattttggcaagcataatttctacccaatcctcaacaaagaacgtgacttccatgcccggcagcaggtctcttgttttgaaaatatccaaaaagtagtcctcaggacttgtatatgtttcatcagctttcagccgcttgatatcaatagcaatcacttcttggtctgtgtcgtttcttgccccgtgaggcacatgcggcggcgcgatataggcagattccaaggctgtcatttttcttgtcacatctccgacagtcatcatcagctcgccagaaacgaccatgccgatttggacctccttatgctgatggggttcaacattggtatgcggcgggacgtaagacattaatacttcagtatcccctcgtacggttgaatactgcctcactccgttttcccattcaattaatttcggtgtcgggaaataaagctcctgcatatcttctttagttttcatcatcaacgtctccttttccaaataatgaccagctcattggaatgcttttgaatgtttttacaaaggttagcccgtacttttgccgtgcaagctcattggttaaggcaatgtcatacaaaccttcttttacttttcttgcggcttgactggttgaattgactagtttgaaacgaacatctttgcgggtaaaatattttattaaattaataggtgaaggatgtgaaacaataacagatgtatcaagcatatcgtctctgaattcaaaatcaggacgaacagccaggccgtacatcggtgtatcgcacctgaagatctgcaatagctgcaaatccggcctcatgtagaaatgcttaatgccatcgtaagcatgtgggacgatggtatattccagcgggctttggagcgtcctttcgatgcacgattcaaaagtatcatgcaaggacaatttactgttcagcccttgtagaagagtaaaattggaaatgaaatgctttgctgcgtactcactgcttgtcccctcagggccgagcgtgttgactgtaatgagtttggatagtgaatcagttcttttttttgtctgaatgctattatccaatataatcatgagcaccaaccaatcttttaaaattttaagtaaattttatccagtggaaattgaactgtcaatgttttttgaaaatattgataattattcccatacaaacaaaaaaaccctttaaaaagggtttttaattataggaatttagaaactttgtttattgagataaggactgatcggccttctgctcaagtttgccgtactttttatatgcgaatacactgagcacaaatccgaggactgtgatggcggcgcaaatcaatccgacagctgcatagccgtatgccacatatacgggtcccattaaagcagaacctaatgtcacggccagattcgaggcgagactgtaaaacaccatgacttttcctcgatgacgctctgagcagtcactcaaaatggtgctgagcagcgtcaccgtcaaactttgcattaatccccaaataaataggctggcgattaacagaaacatagacgccggcgcatatggtaaacacgccagcagaacgctgatgacccccagcgcaatcaaaagggagcgcatttttccgatgcggtcggctatctttcctgtaatcacactcatggaaaacccgattccataaatcatgataaataagcccgcagccgtgtttcctccggtaaaaacgtcctgaagataggtgcctaaaaaggaatacataccgtaaaaaccaatcatattacaaaaggttattgtgatataaacaggtacacgagggactttcagcgcatcccggaatgttcctgcgggctcttctatttcttccttgccgctgtttttatgttgggcatggcggcgcatttcaaggagaatcagcagaacaactaaaacacccatcagggcgaaaatccaaaacgtccatctccaatgcaggacgccgccgataaatgatccgagcggcactccgaaaatcagcgccagcgaccagcttgaaacgatcagtcccatcaccttgccccggtatgtataaggaacacgatcaccgacaactgcgtaagcggtcggaacaaacgctcccgcagccaatcccgaaagcgcccggcctaaaaagaagaaaaaaatattttgagctaaagcgcatatcaccgttcctatgataaaaatcataagcccggccaataagctcagttctctggagtatttatcgcctaatggaaccaaaagcggcgcaccgataaaaatcataacgccgtaaatactgatagataacgcaaggacgctgacatctgagctgaaggcttttgctaaatccggcagcagcggtgagatcacaagctcttcagatccggctgcaaatacccccatcgttaaagccagtgccaacaataacggaaaatgatgttttgttttgatgtcattgttttgattgctgttcattctttctcaaacacctcttccataatcttcttatcataaagttgtattatagtttagcattgttttttctctatttacaattcgaacgaaatatttataagttttattattttcatttaaatcccattatatatttctatatttcattctaaaaatacatgaggatgtaacacgtaaaaaaagctctccggcctcccggagagctttttctattgcgcctctgtctgctttttttcaatcgtttcatgatttatacgctttttgatgcttagatgatagtatgcataacagaaaataatgatcggcacaccgcagtataagccaattctttgatccggaatgaaaataaggctgatcaacacgcagccatataaacaaaatccgagaatcgggactagcggataaagcggcgttctgaactccagatcattcacatttccgccttctgccaggaaacgcctgcgaaagaaaaattgcgacgcacaaatggacatccacgcgacaactgtcaccatgcccgagattgagatacaccataaatacactgtttctgcagccatgacacttgtcagcagcgaacagcctgaaatgcctagcgtaatcagcagggcattcatcggcacgcctttttttgtcagtctggtgagaaaggagggacccatttgatttgatgaaagtgaccacatcatacgcgacgccgcatacaatcccgaattagcaacagataaaatggccgttaagatgacaaagttcatgatatctgccgaaaatgggatgccgatttgatcgagtactgctacaaacgggctttcaatcacccccgccgttttgtacggaaggatggcaaccaagacgaacatagcgagcacaaagaaaaacagcgtgcgccaaataacatttcgaatggactttggcagtgttttttccgggctttcactttcccctgccgcaatgccgacaagctccgttccctggaacgagaagtttaccatgaccagcgtaaacataacggccagcaccccattagggaaaagccctctatcagtcataaagttagacaaaaagggtgtctcctgtccgcctttaaagtcaatcaagccaaacacagcggctccgccaatcacaataaataatatgatcgccgccactttgatgcttgaaaaccaaaattccatttccgcaaagcttctgacagagagcgcattaatcaaaaagatgacgatgccgaacacgaggcaccatatccagatcggaacggagggcagccacctttgcatcaaaatgcctgctgacgtcagctctaaccctactgtattggcccagctgaaccaatacagccagccaatcataaagcctgtcgactgtcccagaaatttagtggcgtaggcctgaaacgatccggccaccggcatggcaacagccaattctcctaaacaaagcatgacgagatacattaaaaatccgccgatgatatacgcggcaatggcgccgagcggtcccgcctggctaatggtaaagccagagcctagaaacagcccagtgccaatcacccctcccaaagcaatcataaacaaatgcctgcttttcatgctgcgctgcaattcatttttatgattctgcatcatccttccccctttggttcttttgccgtgatggtcatccggtagctttgcaaaagatgaacggtggtttgctgtatgaggagaggcaatacatgaaatgtgtacggtttatagactcgttctgtccatttatggccgtcttttccgtacacgcccatattaatggatggaatattcagcttgcgtatgtctttgaacggaatggtcccaatcatattccacccagggaagttcctgataaaagaatcaatttcgccatcggtttcgtgcagtgataaaaaactgccgtctgccaagtaggggaaaaactttttgaagacaaatgtttcgcctgtcgattcagcggttttgtcagccgcttctttaatcacatgctgcaaaagctgatctcttgcgctatcttctttcaaatagttatgcggcaggtaaggaggtgcgtaaaatagaatgacttttgcgccttgatcggggtcaagcttttgaagctcttcgattgcctgaaagcatctcatgcgaagttcaaggtgctcgttggctttgaatgtctgctcgatacactgctcgggatctattccccggtttctcagcttttctaagtattgctccaggctatacacttgaatgccccatgataaatgtttctttggcaggttggctctttttacatattcttcgtaataatctgataatttttgttctgtctcccggcatgcttcctcagtgacttcaataagcaaatccatcatttcttttgctgttctttcataaataaaacaattgaaatacaagctggtgctgacagccgtttgcacattataggattccttgttatcacgctgatacaaacaggatgggggcagaaccaactccccttcaaccttttctgccagatggatgttattgtggagacggcttgtgatttcagatgaaatgaaatttgggtcaatccctgccagtgtatcgccaacatggacttcacgcccgtaaatgtaaaagcaaggcaacagttttcccgcggctccggtatagatatatcttgtctgatcaccatcgtaaagcggggtaataaaatccgtattaatagcagccaaatagtgaagctgtttttctttttttagccggttcagctctgaaatgctggcgagaatgcccgaatgctggctctcctcatcgggattggccataaacaatacatttcccggcaacgtctcaaggttctccgaaaaatgcaggagattggctaaatgcacggcgatgccgctttgcatatcgacagatcctcttccgaacatccactcgcctgatttggcatcccgctgaacatcctgatcgaactcatagcggcttaaatactcggccaatttctcacaatcaaaagcgatatcctttaaagggccgaaatcttcaattccaactgtatccagatgggcatggtaaatgactgtatttcggctttctccatgtcctttaataaacgcaaaaatatttttgcgtttgtatgggtcattgggaatggcctgttcccacacatgactggggttttcctgaaaataaggatagctcgtgatcacttctttgatgaaatctgcttttgtcccttctccaacggtgccgttcacgctgctgaggctgaccagagatgctgtcagcgcctccactctttcagccggattcatgtgactgatttttgtatactgcataaattgtcctcctgatcaaaaagttgaaatcgtgcgatccgctaaagaatcgcacgattttatttctctcaaatcaaaaagcttcggacgttgttttggcttgcatatgaagaattaagtaatcgggaccgcctgcttttgagtctgttcctgacatattaaaaccgccgaacggctgatagccgacaattgctccggtacatcctctgttaaaatataggtttccgacatggaaatcctcgcgcgcccgttcaatgtgcgcacggtttttcgtcagaagcgcacctgttaatccgtattccgtgttattggcaatctccagcatatgatcgaaatcacgcgctttgcaaatcgcaacaaccgggccgaaaatttcttcctgcatcaagcgggcgttttcatcaacatctgcaaagatcgtcggctgaataaagtagccttttgaatcatcgccttctccgccggccaatagcttgccttcagatttgccgatttcaatgtatttcatcactttgttgtaggatgcttcatgaatcacgggacccatatacgtatcaggatcttctggattgccgacagtcagcgttttggtcagcgccacagctttttccaccacttcatcatacacatcctgatgaatgaccgcgcgggagcccgcagaacacttctgtcctgaatatccaaatgctgaatacacgatagaggatgcagcaaggtcaagatcagcgtccttgtcgacaagcactgtgtcttttccgcccatttctgcaattacccgtttgagccatttttggcccggctgcactttggcagctcgctcataaatccggcagccgactgcacgggaacctgtaaatgagacaaaccgtgtcttcggatgctcaactaagaaatcaccgatctccgcaccatctcccggaatgtaattcagaacgccgtttggcagacccgcttcctccatgacctcgacaaattttgctgccactaccggggctgcgtcagccggttttaagagaatcgtatttcctgtcacaatcgctgccaccgctgttcccgccataatcgcgagcgggaagttaaatggagaaatgacgatgccgacgccaagcgcttcgtaatgatattgattgacctcgccagcacggctcttcaccggagccccttccttgagctttaacatttggcgcgcgtagaactctaaaaagtctatcgcttcagccgtgtccgcatctgcttccttccacggttttcctgcttccttcacaagatagcttgaaaattcatgctttcttctgcgcaaaatagccgctgccttaaagagaatatttgcgcggtgctccggtctttgttttttccaggaatcaaatgcctgcaatgcggcttgcatcgctttttcagcaagctcttgatccgctgtagacgcgtacccaatgatctcttctttatttgccgggttaatagaaatgattttgcggtccgtttcaattttttctccatttatgacaagcggataatgcttgccgagctgagtgtttacaaaggccaatgactccccaaatgcagttttattctttgcttccgtaaaatcggtaaatggttcgtgcgcgtatgtgactgtcatatgtagtccccctcgtgttatgaaatatatcttcgcatatgaataaaaatgcaagaatcatgccattttcttgtcttttgctgaaaaaacttgttgaatcgaacagaaatttgtctaacaggtgatcacctttctctttttccgatcttgaacgcaaatttattttgcgttttttgctctttacgcaaaaaacaaatgcaaaattattttgcggaggcttctcaaattagacccatccgcggaaacgcgatgcttctgccgattttctgatgcccgtcatgtaagccgccaaacgcatatccactttatgtgttgccgctgtttgataaattgtttcgaacgagctgaccatgacgcttctcagtttttctgcaacctcttcttccgaccaataatatccttggttgttttgcacccattcaaaataagaaaccgtgacgccgccggcactcgctaggatatccggcacaagcagcacgcctctttcattcaggatcttagtggcatcaatggttgtcgggccgttcgccgcttcaacgacgattgacgcctgaatgttatgtgcgtttttggctgtgatttgattggagatcgcggcaggcactaaaatatcgcaatccttttcaagcagctcctcatttgtgatgacgtcagtaaataaattggtgaccataccaaagctgtcccgtttatcgagcaaataagggatatcaaggccgtctgggttgtagagcccgccattggcatcagaaatcccgatcaccttcgcgcccgcatcgtgcatgaatttggccaggaagctacccgcgtttccaaagccctgtatgatgatgcgcgcgttttgcagcttgatcccttttttcttcaccgcctcttcaatacaaatcgtgacgccctgtgccgtcgctgtttcccgtccttgcgatcctcccaaaacaagcggtttacctgtaataaagcccggagaatcgaattcccgcagccggctgtactcatccatcatccacgccataatctgcgaattggtgtacacatcgggagctggaatatcctttgtcggaccgacgatctggctgatggcacggacataccccctgctcagcctttccagttctccaaatgacattgtccgcggatcacaaataataccgcccttcccgccgccgtaaggaagattggcaatcccgcatttgagcgtcatccaaatggataatgcctttacttcctcttcattaacttctggatggaagcgaacgcccccctttgtcggaccgacagcatcattgtgctgtgaccggtagcctgtgaacactttgacgctcccattgtccattttgaccggaatgcggacagtgagcattctctgcggctctttcatgagttcatacatatctcccggataacccagcttccgaagggcttccttaatgattgtttgggtagacagaaataagttaagagcttctttttcttcatctttcgagacttgctttgctgacatctttttcacctcattgtttttttggccggctgtaatgtaagcgctttaaaaaatcagcccgccaattcctttcttcattggattcacccttatcatcatgcaagatccgtaccagcttttgaatccacaaaaaaagagactgaaaacatctcagtctctgactacaaatctatcgattaacggggatcaatcaccagctgcgtttcagcataaaaactgccgattcccaaaccgtttactacatcgcctttaatcgtgtaagtgcctgcgcgaggaagagttttacgcaccatgacaaggtcaaattcggatgcgcctaacaaatcaagcgtaagcgggagtctgactgtttttccatcgtttaaaatctgtgtttctttcagtgttcttccattcactgaatctcttgtcgtagcatgaaacccgtcaggaaattgaaattctaccgctccaagagaaagcaccgcatttggtttatatgtcacttcaatatcagaaatggtccactctttcgtgctgttaactgtttttgcctcgattgatgcagactgtgcatgagcttggcccgaaggaagtaagattgatagtaaaacagctgaactgatgaataatgaagatacgaatgaagttctttttagcatgacatttccccctaattgattgttgaaatttggccagagcgtcctctgcagaaaaagcgctttttcataattcgcgaattaccagttctttttcttaaaaattaatctatcatcattttccatggaagtaaatgttttttaaggaatattaacacttggaattcaatgagaattccttcctgtttatacaaggttcaaatggacgatttccctctctttttctagtaacatctgcctgacattttatatcttttatcctattttaaaaaagggcaaaaaaagtcgaagatgcctctgctcttcgattgatcacgttcctatttttatctgaattcagtgttccagttaaaaccgatcgtctcatcatcccacggaattcttttttcatcaggctgatccgggttatacgacatggtggtaaaatagataattgtcagcggcgtctctcccagcactctatatccgtgagccaccccttttgggattaataacagcatcgggttgtcttcgcccatataatagacgtccgtttctccttttgtctttgaatcctctcgaagatcgtataggacaacctgagcgtggccggttgggaagaaccagagatcatcctgcttctcatgataatgaaatgccttaatcacacccggatagcttttcgaccaagaggcctgcccaaaatgctcaaggagattctcatcgtcccggaccagctcagcaaaaaagcctctgtcatcgctatgcttcatcaattttttcaccttgactccatcaatcacacgcactgctcctttcctgcaaatactctcgtaacgcttcccgccagtggcgggggcggatgccggcttcttcaatagcccgatggctcagcacagagtatgccggacggggcgttttgttcccgtattcctctgtcgttacagacaaaatggctgtttccagcccgctttcttccataattgccgtcgcaaactcataccagctgcatatgcctgaattgctgacatgatagatgcccggcggatggctgaacagcttgatgaccgcttctgctaaatccttcgtataagtcggcgaaccaatttgatcgctgacaacccgaagctcttgtttcgtttcagcaagtttcagcatggtttcaacgaaattactgccgccatgtccgtacacccacgatgtcctgatgatcgtgctgtcttttgtcgttaatcgtatcagttcttctccgagccttttgcttttgccataaatggttttcggatcgaggggatcgtcttccctatatggctgggttcctttcccattgaatacatagtccgtgctgatatgaacatattgagctccgatgcgggttgactcaagcgctgtataataagcgccgattccgttaatcaagtacgctttatcaagctctttctcgcattgatcaaccgacgtaaacgcggcgctattgaccacgatatccggctgataatggccaaacgaatgccgtactgagcgctggtcagcaatgttcatcatcttctttgttaacgcaatgacctcatatccggcttgcttcagctggcggcatagttccaagccaagctgtcctcccgccccagtcaccaatacctttgtcaatcagatcaccttctcatcggtcattgtctgtataccactgaatcgtacgcgcaatgccttcttcaaacgtcacttcctgccgccagcccagttcgtttttcagctttgatgcattgatcgcatagcgccggtcatgcccttttcggtcttccacgtgggcgaacaattcctcacagcccagatgcttcaaaatgacactcgccagctctttattcgtgcgttcatttccgccgccgatgttatacacctcgccgtcggtccctttttctaaaatcagcttgatcgcgcggcaatgatcctccgcaaacagccagtctcggatctggagtccatcgccatacagcggaacaggcaggccctgcttcgcatgacggataatcgtcggaatcattttttcgctgtgctgataaggtccgtaattgttgctgcatcgtgtaatgatggccggaagcttgtgggttttcacataagacaacacgagcaaatcagagcttgctttgctggctgagtatgggttattaggagaaagcggcgtcgtttctgtaaacgcgggatcatccgcttttaaatccccgtatacctcatctgttgaaatatgaatcagcttcttggcttttcctttcaagaccgcttccgccaatcggtatgtccccatgacatttgtggtgataaacggctccgcttgggaaatgcttctgtccacatgcgattctgctgcgaagtgaatgacgccatcgtaggtctcgtcaaaagcgcggtcgatatcctcctgaacgctgatgtccccttttacaaagcgaaaacggctgttttgctttaatttttccatttcctccgggtggctggcgtacgtcagtttatctaaaacggtaatgcgcgcatccgtttccctcagcatgagctttgtaaacgtgagcccgatgaagccggccccgcctgtaattaaatatgattttgccatcacttttcgtcctgtcctttccgtaaagcctggtgtacaagctgggaagcgagataaagcgattcgtgagttccggcatctacccaccagcctgataacacatcatacgtaagctggctgttttcgatgtatagattattcacatcggtgatttccagctcgccgcgctttgatggtgatatttgttcaatatatgaaaacacctctgcatcatacatataaatgccggtaacacaaaggttggtcggtggctgttcgggcttttcgatgatggaacgaatccgcttgtttttctcatcaatctcagcaatcccgaaacgttccgggtcatcaacttctttcagaagcacttttgctcctttcccctgctgttcaaagcgttctgtataaggctttaatgaatcttcaaatatattatcacctaataataaaatgaaagactcttttttcgtaaagcgctttgcataagacagcccatccgaaatgcccgatgctgccggctgtacttgataagtgatagtaacgccaagctcttccccgttcccaagcagtttgtaaaattgcggcatatgctccttttggctgatgagtaaaatgtcttttattccggcttcctgcagcttcataatcgaccagtatatcatcggatacgggcctacaggaagcaaatgcttgttgacggctttcgttaagggcataaggcgtgagccgtttcctccggctaaaataacacctttcacattaacacttccttacatgcatttttatatctcttgttcatataaatcttgaagaatagctgttacccgtataatgcctttgccatccacgagcggccttcctcccttgtgcaaagaaaggcgaagaggatagctgctcataatgcgtgacatctgatagatgagtgtttcatccggtacaagctcacccaatccaagatcaagagcggcgccttggtcagcaaatgttttggctgtagccgtttgatgctcaacctgagaaagaacaaggcacggcacgccgatgcaaatggcttcatatagagagatgccgccagcgacaatggctgcgtccgcttgtttcatcaaacctgccatatcatttgtctgttcgatcatcttgtactgcggcttcttttcgatccgccttcggactgcctcttgatgcggtgaagcgctccccatcacaaacatcatgtttttgtcttttatgtcggggacttgatcagcggcagccagcactttaaaaataagctgcttcggatcacttcctcctaatgcaacaaggatattgcggcagtctttcttaagtgtgtaatcctctcttgcggcctgaaaggcggggtgaagaataagatagtccggaccttcatagatgcgtgtgtttccctgaacgtacaccctgcttctgatgtcaccgtaaattccgttaatgactgcgtcactatattgaatcgatttaccgtttttctcttcaaaaagaacaattttcgcatctgtctccgtctttattttctttaacagctctgcaggcgcgcctagaatatcaaacaaaagcaaatcaagcttcttgctttttatttcccggagaataaattcgtgctgctgcagctccggctttacgatgacctgccaatgctcttcatgaagaaacgcttcagaatcctgattcgtataaaacgtaatcaagcatcgctgtttgagcccctccgcaagcctcttcatccggacaacatggcccattcccttttcatagccgccgtctgcgaagatcccaacatgcatggctagtcagcctctcgttcggttgccgcatcggggttccggttcagaagggtgataagctctgaggcggatacatcggggcgctcgcctgctttttgatagagggcctttatcgattcatagtcttcctttgtatcaatggtcagccgatattgaggggcgcgaaatcgttccggcgcctctaaaaactgaacacgataaagagctggatgattccttatatataacgtgacatgctcctgatattgatcctccaaagcctgaatacggctgatgtcaattaacaggttggcgttgaccacttcgccgcaaatccctaatggggcattcaggatatacgtataatccgagccttgatcaaaatgcgcctgaatcattacatcgagcagctcaggatcgacaaacggattatcacctgttaaccggatgatgactgacggtttaacagcttctatgaccttcacaaacctatcgaggacacgttcttcgctcccgcggaaaacacgaaagccttgtttgatacagtgcgcctctaatatgtcgtcagtttctttgtcagacgtggcgatgacaagattatcccgatccttttggtaaaacgcgctttgccggacacggtgaacgagaatatcaagtaaacgattcgatccgagcggccgaagcacttttcccggaagccttgttgaacccattcttgcttgaatgataaagagaatatcattcatgaaacgggctgtccttcagtaaaatgtcatcccagacaatgcctgtgtcggctggaatgtctcttacagcccgaacaccgctggtcagcagttcaaaaaatctcgggtgcagcccctgcggcttttgtccgggccgaagcactgcgatattgtcttcactaaaggcttcacctttttgaatcggagctgttgtaaaaatgcctctgtatgcaaagtttctgatttctccttcgatggcggtcgttgttttgtatgaactgccaagcagtttttcagagaccggctttgtgatcccctgtttcagctcagcttccgttttcctgatgccatcgaccatttctttcaattcatccggatttaatgcaaacgagtggtcagcacccggcagatttttatcgatcgtaaaatgcttttctatcagttttgctccgagccgaaccgcggcacacggcgcttctgtcggatgctcgctatgatcggagaagccgattaccgcctcaggaaaagcggcggcaagcatcggaatgacgctgaggttgctgtactccggcggtgctgggtatttcgccacacaatgcattatggcaatttgattgtttccctctgccctgatggtgcgccaagcttcgtgaacatcagagatttcagctccggctgtcgagaaaatcatcggcctgttcagccgggcgacatatttaagcagcgggagatggttaatttcataggatgcgattttaaaagcgctcggcgaggtagactgaagcagatcagctgacccctcgtcacataccgtacttaaaaagatcacctgcttttcgcggcagtaatccaatagcggtaaaatccactcagcaggcatttccatagattgaaccaaagaaaaaatagagacgtccttgcccgctgccgtcttgtacaaaccaggatctttctggtacatcctatcagcttggaacatttgaaatttcacggcatccgctcccgcttccgccgcggcgtctatcagcgcaaaagcctgatcaagcttcccgtcatgattaatccccgcctcagcaataataaaaacaggagcgtctttgcctacagttttattcgcgatctgaaacgctgccattatttcgcctccttgcccggccaaatatgataatagtaatacgattgttcagcggtgaagcccattcgttcataaaggcggatcgcccttacattgtgaagctgcgtccccgctgttaccgttctatgcttctgggtctccggttgttctatgagattcgccaataaatgaaacgcaatacgtttcccttcaaatcccggctttacagccatcaaatcgagaatgcactcatcatctcttgataagccctgaagatagccgatgacctcgccattgtgtttagcgacaatattgaccgccgcccttccattcagattgtttcgtgtccactcctgaaatatttcgtttgctgcatcgcggctgagatgaggatcctgaaaatatctgctttttgtaaacgagtctcgggccagctcacatatcgcttctgtgtctccgggctcaggcgggcccagttcaaaaaatggcggtgttttgtcataaaaagacggaggcatcgccagcttcagcaaactcccgacaaagtaagaggatggctgctgttgtatcacatgcgcggctccgatatcttcagccggaacacggacaaagataaaatccgtttcatccatttggcgtacagtataaaaagcttcaaacagcctctttagctgcccggtactatttgccgcaagaagtttgacgttcatgactttcttctgaagcaccttgctttcccacaaagaatcttcgtaaagcaatacgccttggagcctgctgttttcaaaaaggccgagggaaaattgatacggaacatccaatgtaagctttctgctttggagaaattcctcaattgcctctttggagacattttcttttaccgtatacacttaatcagccccttttacgatatcccgcacagcttcaatgacatcatctacatcatcgtcagacattgatggatagagcgggagagaaagggttcgtttatagtaattcatggcattcggaaagtccgcttccttatatccaaattgcttttgataatacggatgaatgtgtactggaataaaatgaacgctagtgccgatattgtattcatcctttaaagccgtaatcatttcgctgcgcgtaaccccggcctttttttcatcaacttgcagaacatatagatgccaggcgtgcctgccgtcatcatggacaaacggcgtgatcagcccaggaatctgctgaaaagcggtttgatagcggccggcaatctcttctctccgtttctgcatatcatccagccgtttcagctgatgaagtccgagggccgcctgcaaatcaaacatattcatcttatagccgggcgattcgacttcatagtaccagctgccatttgaagaataacggttccatgcggctttactcatgccgtgaaggcttagcacccgtatcttatcggcaagctcctcatcatcagtcgtcagcatgccgccttcccctgtcgcgaggtttttggtggcgtaaaagctgaatgccgttgcatccccgatagaaccgatcattctttgcttataagtcgtatataccgcatgtgccgcatcctccagcacgaataaaccatgattttgggcaacagccaatattgcatccatatcgcaggactgcccgccaaagtggacgggcacaactgctttcgttcgcggtgtgacggccgcctcaagctttaccgggtcaatattgagcgtgttttcgtcaatatccgcaaacacaggcgtcgctcccgtatgaataatcgtattggcggtcgagctgaacgtaagcggagaggtaatgacctcgtccccgggcccaatcccttttgctttcaaagccaaaaataaagctgcggtacatgaattcaccgccacggcgtgcttcgccccgacaaacgcggcaaactctttttcaaactgctgaaccttcgggcctttagagagccatcccgattcaagcgtttctgtaacctcctgaatttcttccttaccgattaacggcaatgagtaagggagaaaatgatttctcttttgcaccatttctttgcgctcctatcattttattcagtatcttcccgcctgtaatcaacccctgttttggctttcagttccgcaaataaagcatttgttgattctgccaccggataattagccgctatgaatgccaggcgcgcctcttctgctttttgatgcacgtcgggacttcgaagaacctcaaccaaggtgtgcgccagttcatccggctggtcaaacataaaatcgccaagagactcataatacggatacgagcgatttccggacgattttcctatcagcacaggcttttgaaacagcatggcttcaagaccgactgtcgaggtttgcgtcactgcggcatcaacatacggcagcaaatcataaagctccagctcctttttgatgactctgcatgcttgatgttttttcgccgcctcgtgatacagatcaagcttgttttttccgatttcccacgggtggggtttgataatgatttgcagctgcttctgatcagaaagcccctgcagcacaccggaataaaagtcttctgaaaagggctgagtggcaatgagcacaatttttttagtcggctgaaaagcaagttttcgatagaatatggacatatccataggcgttctgttaaaaatctgatcgaagcggggatgtcccgttacgagaatctgctcgggtttacagccttttcgtatgaaccactctgcttcatacgcaccaaaaacagcttgataggttgtaaaaacaggaatgaaggcttcatctcccatcaatgcgccatgctgaagacaaatgctgacggccccttttctttgacacatgagagcgagcaccctgctgtaaatgtcttctgccgttccgacaataacagctgaaatcttttcctgttcaaacagcgcatcaactgtatcaatggcctctataaataaaggaatatctttgaaaagccggtcgcgaaacgcttgatcaccaaatgccgggtgatcatcataaggggcgagaagcgaacaggctgtttcgagatactgcttcgaatcgcctttttggcatgaatccgcaatctcccgcttgctaattacaggcagatcacaataatgcggcaaactccatctggccaaaacagccgttttttcaggatcaaattgatagtaattttcgtttgaaaaacgcaggtaatcaaagtgcaaaatgactttccctttaacaggttcgtcatttgttttaacgatgttttggattctttcttcaaaaaacggctgaatctgtccctcatcgatatgctgatccaccgatccgaataattccggttcttcttccatcatcaccctcagttcagggctgatgtattgataaaaattactgataagcccaagcggaatccctttgtagcgaagtttgtcaaaaagctccacgtacttccggtacagcacccaataattgcttaaataggccgacaagctctcaccccattccaagcttttttaatgattcacgcagctctcggcaatttcgctgcggaggaaggttcctgacaaattcatttttttctaattcaaacagctgaaagtgaatcgattggtcggtaatataattcaggtccagctcctcatccagtgggtaaaacggataaaaatgattgactctccaaaagaaccgggcatctcctatacggtaaaacgccgggctttcatcccaataggagccaaacttctcctttaccttctcaagcaccgaatacctgtgcatcaccgagcaatgatcaattgcgcacggcgcgttccatgtcacttgagcggcaggcctgacagtttcttttacaatgtcacgattctcgtttaaatgataggttttggaggctgagtaaatcacagccttttcaggatgggtatcgagctcccgcaccattttcaggaggcggtccggcatatagatgttgtcatccgtcgcataggtgatatattcaccctccgccatctcaatcgcctgattgatcagtgccgcgtatctcgttttttctgttctttccttcactccagatatatcgctttgataaaaacgcactcggttatcattcaaaaaaggacggattacattcagcgtctcttcattggagttgtcatccataataaacaattcaaaatctgaaaacgtttgtgagagtatgctagaaatggactttgccacataatcgcttttgttatagctcgtcataatgactgatactttaggcaaatcctacacctccttcttggaacttcacacctgaaactatcgttatcttatgttgcttatgctcaagttgcgctagggatacaaaccaatatgcgaaaagtttgtgtatgtttctgaaaaacagcggctgcccagagcgaaatctgatcggtccgctgttctttttcagcataatccaagcatcagcctcataaggtgaaagagataaaaatcgcaccagcgactaagatcgttttccatcggaggtgagtcatcgcggagcgttcacctatacatccagaacatgttttgaatggttttcataaaaaggaggaacgatatgaaaccgaaaaaaaatcaatatcagcaaatgcaggcatttgataatatgcaggggtatcagcctcagtttggcgccaacccgtacccgcagcaaggccaaggctcacaaatgcagacaatggggatgcagccaatgatgccaatgcagcagggacagcaaggacaacaaggacagcagggatttggattcccgggccagcagcagggcggcggttttcaaattccatcggggcctacaccgtcaggaccgggccaaagcgttcccggcatgctgcctgttgaggaatcttacatcgagaatattttgcgcctgaatcggggaaaaacggccaccatttatatgacatttgaaaacagcaaggaatggggctcgaagatttttcgcggcgtcatcgaagctgcgggccgggatcacattattatcagcgacccgaaatcaggaacacgctacctgctcctgacaatctacctcgattacattacatttgatgaagaaattgcttatacgtatccatattccatggcgtcctattcgccaagataagaaaaaagccaatcactcatatgatgaggattggcttttttgtttatagatatttgacggctgcgacaacgatcataatccaagaaataataaacgccacaccgccgagcggggtgatcgctccaagaatggagatttgcgtcacacttagaatatataagcttccggaaaacagcacaattcccgcaaacatcagccagccggctgtcgtgacactgcctatgccggataatttatcagccagaaacgcgacaacgaataacccaagggcgtgatacatatgatactgcacgcctgtgtgccaaacctgaagatacttatcaggtattttcccttctaatccgtgagcgccgaatgctccgagtcccacggcaagcagggcgttaatggcccctaatatgataaaaactttcatctatctctcccgccttttcgttaaactcatatcatttatcttatcgcacctgcaccaaaattcaatgtttgttctccgttgacacgagattgtcggattttctcctgcgccaaagctggaactggtcagctgctattgcagcaagcgtccctaatacgagcccgttgcttaatagagaaataaataccggatgcaatccctttaacgcagtttcaggaacaaacatgataccgacccctgtcagcagtgagataccgatgatagacctcaccctttttgattcttctttctcatatgaatcaaattcggcaaaggccagaccgcccattgcggagaacacaacaaaattcaccgcaaatccaacgggtgacggcaggctcgcaaacgtattcataaaaaacgggatcacgctgatcacgataaccagaatactgccgagcataaacggttttttagaaggcatcttggtcgtttcaataaaacctgcggctcccgaaatcggaacaggcgcaatagctcccgtcaaaccgctaagcagatggctgaatgaagctgcaaaaccggcatggcgttcatgatgctttccatcaggctgtttgctgaattttttcatggcgatgtccacgaccttcatgctcgccagcatattcacgatcagcaagatggtaataaaaatagaagtgatgatcaggccgctgttaaataacggggtcccaaaaggaaacagggaaggcagctgaaacagccggtccggcatttcaatcggctttgcggctccggcagccgcaaacagcacccacccgccgaacaaggctaataaaatagaatattgcttaaaaaacatgatgttcgaatttgtcattataaaagcggcagcgatcacaacaagcgccaggccaaatacaagaccgtccaccccgtcctgtcgataaccgattccgagaattccttttataatgggctgactcagctgcatgacaagaagcaataaatagacgcccgttacaaccggagtaaacaattttgcaagtctgtcaatgaccttgaaaacacttaacaaaaagaaacatacagcgcttacaagaagagctccctgcaaaccccgcagtgtgtctccatatgtcgcaaacacagttcccgtcagccctgcgtaaatcgtatacactccccaccacaagccggctgggctttcattgatcggcagtctgtggcctttcaaacactgaatgacggcggcaattcccagtacaaaaaaagtgctttgaatcaatcttgcagaatctgagtgatccagatgaaacgactgggcaaccgccaccggaacaacaatcgccgcagcaataataaacgctgtccattgcagcgcgccaagaaccaatttcacgtaagctcaacctctctctttaaaaatcaaataaagactctccgtttccatcctcttcctgcttctctttttcttgctttcgatatttgtttaatcccgcgctccccatcattttttccatcatcagctggtctgtcgatggcggcgcggcgggacttggcgtaacgctcggctgtatgcggggcgcgctcgcgttctccggctgatcaagcacgacatcacacagagaacggacaaccgctacataacgcttcagctcctcatcccgttcagccgtttttgctttttttagctcttcttccatcttttgaatcaaagcagatatatgaatgttcatgaagcaccctccaaaaaaataaatgttgtcttcctgcattttatcaaattcctgctgaaaacgcagatatgagtttgttattttttctgacaaaccttgcgcgattgacaagcagaagagatttttcacataataaatcaccataccttacaaaaaggagaaacggaatgaacagcatcccctctatcatcagcaagcataaagcctattttgcggcgggacatacgagaccgcttgaatcgagactgaacattttgcgaaagctgaaacaagccgtcagaactcatgaagccgatctcatagccgctctctaccaggatctccataaatccgagcaagaagcatactcaacagaaatcggaatcgtcttggaggaaatcagctttgtcatgaaacggctgagaaaatggtccaagccgaaacgagtcaaaacgccgttgactcatctaggctccaaaagcatcatcatccctgagccgtatggaaccgttttggtgattgcgccttggaactatcccttgcagctggcgctttctccgttgattggcgccattgcggcggggaacacggtcgttctcaagccatcagaatatacgccggctgtttctgctattctttccaaactcatcagcagcgtttttccaactgattatgtcgctatggcagaaggcgggcccgatgtcagcacagcattattacagcagccctttgactacattttctttaccggcagtgtagctgtaggaaaaatcgtcatggaggccgccgccaaacaattaattcccgtaaccttggagctcggcggcaaaagtccctgcatcgtccataaagatgctgacattcagcttgccgccaaacgcatcgtcttcgggaaatttacaaatgcgggacaaacctgcatcgcaccggattatttatttgtccacgaggacatcaaaacgaagctcacagaagaaatgaagcgtgcgatcagagaattttacggccctcagccggaacggaatccacagtacggcaaaatcgtcagtgagcgccactatcagcggctgctcagctttctgaatgatggcatcccgctcacaggcggacaatctgatcccaatcatcacaaaattgcgccgaccattctcgaacaagtgagagatgactctccagtgatgcaggaggagattttcgggccgattcttccgctctttacataccgcaatatcggggaagtcattgagaaagtccaatcgcgccctaagccgctcgccctgtatctcttcaccacaaacaaagaaattgagcgcgctgttttaggaaatctgtcgtttggcgggggctgtgtcaatgatacgttaatgcatgttgcgacgccgtatttgccattcggcggcgtcggggaaagcggcatcggcagctatcacgggtttgacagttttaacacattcacgcacaaaaaaagcgtcgtcaaacaaacgaaccgtttcgacttcgcatttcgttatccttcctccaaaaacgggctgcgaatgattcgaaaaatactcaaataaaaaagcgcagatcacctgcgctttttacaaatccttaatacaccaatcaatcggcgcctctcccattttctccaaataggcattcgcccgggaaaacggtctgctcccgaaaaatccgtttctcgcagaaaacgggctgggatgcgtcgattcaatgataaaatgcttggaggtgtcgatccgttcttttttcatttgagcatgccgtccccacaaaataaagataaccggccgctctctttcactcagcacgtcaataattcggtccgtcagtcgctcccagccttttcccttatgggaattcgcctgtccgcgccttactgtcagcacagtattcagcaaaagaacgccttgctttgcccagctcacaagcgacccgtgattcgggatgctgcacccgatgtcctgctgcagctcaagaaagatattttttaacgaaggcggctgctttacaccgggcttgacagagaagcttaaaccttgagcctgtcccggcccgtgatacggatcttgacccaaaatgacgaccttgacatcatcatatgatgtataatgcagcgcgttgaaaatatcccggctgtccggataaatcgtttgctccgcgtattccctcttcagcatctctctgagctcttgataatacggtttctcaaactcttcctttagctgattccaccagctgtcttgtaaaagctgtttcaagattcaggcctccttacgaacgatgaagtctggaatagacaggctcgccatcccaaaccatttcactttttgcttcccgcctcttcatctcaggctcttcaagcaggacggcaaagtttttcgtcggcagctccccgagtccgtgcttttcacttaaacgatccaaatattgcttccgcttggcgccaaggtcagcagactgattgtctcccgcgtcactgaaggcataaatcacgctggcgcaagggacacgcttcacccggtaatccttggccgcgcgcaaataaaaatcccagtcccagtaattgtgcacatcagcatcgaaatacccgatttcatcatgcagaaaacgtctgtacatgctgcccgacggcacgtatgtagaaaacactctcatatcctcatagtcagcggtataagcaaacaatttccgtgacactggataccttgttccgtttttctcttcaaacgaaactatttccgcatcagaatgaacgaagtctgccgtttctatttcctttgccattttctcgatatgccctggcgtaaagaaatcatcgtcatcacacagcataatgcaatccccagacgcctcttttacaccggcatttctcgcagccacatgccccgagttcttttctaaattgatgacagcaatcggcagctccggataaagtgctttgaccggcacgaccgattccccggcatcattcacaataataatttcatacggcatcaaggtctggcgggaaatcgactccaaaagctcacacaaagccggaatccgattataggtcacaattacgatagaaatcttcatgatgctctccttctcattttcatagtcatgtactattaaaacatatattggacgggagatcagtgggaatatcctactgaaacggcatactacaatgatagaaacagcaaagtggctccgatcagaagcaccatgatcagcatcagatctccaaagacatgaaagatatctttcatgcggacgccattcggaaggataagacgccacagcttagattgatagaccggcagcagcaccagtgcataagaaagacacaaaaatgtaaaagccggcggcacaaaagcacagcctgcatcgtcccaattcatcatgatgtctttcatactagatccatccaataaaaacaaagatatcatgagggctagcaacacaaaggaccccaattgaacctcaaacaggcgcattttctggttatatgcaaatcggaccgcccaaaaccagacataagcatatgaacatagcagcgtaagaatggcacctgctgtaaagacgacatcaggcagccgatcaagcagaaaaacaaaaggcaagctggctgccatagccaagagcatgcagccaccagtaaacaaaaatactgccccatgagctacaaaaccatataaacaagagctaatcctcacgacatacacctcctttacatagaaattctatgtatatacctaaaaaatcagacaagctgacgcctgccaatataacagcccattcggccaaataacggaaataacagcgttgcaaaagcacaagttccaacaaaccaaggtgtcaacaaggattgaaacagcgcagcaggaattacattgaatagaaaaacaagcataaaaatgacgtttggcaccattgagatcagaatcgtatgtagaacaagcttttctccgcgttttccaaactccttcacgccttgatacccaatcagcacccagtagatcatatatgcagctaagatcagccaaacagaaacagaaatgcctttccatactgcttgaacaaacggtgattcaagccatacatgcattattgtaatcgcaatgccgacagcgaatagggcactgttacagaaaagatggaacatcaaaaacgcacgaaacgttactggctgtattttcttaaacgaagaaacaatgtcagttggtgttccaaacgcctgcaataaagtctgcatagcttcctcctcactctttccttcctgaaaagagcgaaacagatgatgttcaatatggctctcaatctcttctatcatcgcctcaccctcaggaagccctttaagcccgcttttgatttcggatacatatgtttctttatccattttgtccgctccacttcagtattcggtccatcatggctgaaaatacgctccattccttcgtgcgttccgccagcacttctttgccctcgtctgtaatccggtaatatttgcggtccggtcctttctcctgcttctcccagtaggaagaaatatacccttggcgttcaagcttgtgaagagaaggatacaaggtcccttctttcatctgcagttcatttccgctgcggcttcccatttcttttacaagctcatagccgtacatcggccgctcgttcagaagcgtcaataccaatataaccgtgcttcccttaaccagctcacgatttaacatctcaaaacccctacctagttttcttatgtagcattttacgaaagcccgttgagattgtcaaatgattcctatagatcttctatattgtgatacagagaaaatctaactataatgaaagacaaaacatgatggaggttcaagacatgtctatgcataaagcactcaccattgccggctcagattccagcggcggtgctgggattcaagctgatttaaaaacatttcaagaaaaaaacgtatacgggatgaccgccttaacggtgatcgttgcgatggacccaaacaacagctggaaccatcaggtattcccgatcgatactgatacaatccgcgcccagcttgcaacaattacggacggcatcggcgtggacgccatgaaaacaggaatgctgccaaccgttgacattatcgagcttgcggcaaaaacgatcaaagaaaaacaattaaaaaatgtggtaattgacccggttatggtttgcaaaggtgctaatgaagtcctttatccggagcacgcccaagccctgcgtgagcaattggctccgctagccactgtcattacgccaaacttgtttgaagccagccagctcagcggcatggatgaactaaaaacagttgacgatatgatcgaagccgcgaaaaaaattcacgcactcggcgctcaatatgtcgtcattacaggcggaggcaaactcaaacacgagaaagccgttgatgttctctatgacggagaaacagcggaagtccttgaaagcgaaatgatcgatacgccttatacacatggcgcaggctgtacattctcagcagccgtgacagcggagcttgccaaaggtgcggaagtcaaagaagccatttacgcagcgaaagaattcatcacagcggccattaaagaatccttcccgctaaaccagtatgttggtcctacgaagcattctgcactgcgcctgaatcaacaatcataaaaaaaggggctgccttacagagaggcagccctttttaaatcaccgaagacttttcacagaaaaaactgccgatcccatcggcagcctgtttatttgatttttaaattgtttgcagatttcctcaaaaatgtttctatcgactgaacaaaaagtgcatattccttcatttgttcatatgcccgcgtgagaatttccgccgtttcactgtgcggcgttgttccgccaagcatttttttcagctgaagcagcacatccttatattcttctcgcttatcttcaacttggttagcagccttttccaaacattccggtgttatcttctgttcatgtatattcaagaaaacaactccttttacagaaaaaaatagtaggttatcgttgaagaatagcacagatggctcagatttcacataagaaaatagaaggattttctacataagtgtccaaattccgacattcatttcagatttcccggtcgcactggctgttacttcatgatttcccgggaaaggaaaatatcttgcactaaagacctcttctccgttattgataaagatttccacagatgacgcgtcgagaaacatgtgtacggtatgcaaatccttgatgcggcaatgtctcgcttctgttctttttccgtcaaagctctttcgttccagcgtaacaatcccctcgtctttatggaaggaaaacgtagccgttccgcggatactgattgaaaagccagactccgtatgaatgtcttccagtagaatctcagttctttcaggtttttccactggaagcgcaccagatgatccatgcatgttgatgtgtatttttttctcatttctgcgcatggcttttagctcaggcagcggctgctgaatcagcttctgtcctgaaagcgtcagctgtctcggcagcgtcatgcagtgaatccagtggcagtcaatggtcggatgggacccttcatcctgatcaggcaccgccatccatgcaaataaaatccgccttccctgatcgtcttcaagtgtttgcggcgcgtaaaaatcaaaaccttgatcaagctccgtaaattcaccatgcttcagttcaggcttgttataatcgaggcggccgacaaaataacctgattgatatacgttctgataacggaaaccgtcagcctcaagcccttgaggcgaaacaatcagcacatccgatccttgaagggaaaacaaatcagggcattcccacatgtatccaaaatcgtccagcccgttgaagcccgcgccggttatcgggccaagaaatctccactctgtcaggttatcagaagcaaacaacacagcctgccctttcaaattctctgtttgcgcaccaatcaccatataccatgtgccttcatgctcccataccttcggatcgcgaaaatgcgccgtatatccttccggaaggcgggcgacgacaccctttttctcaaaggacagcccgtcgtcagaaacagcaaggcattgatacgtttcccgatttccatcctgatccctgacatttcctgtgtaaaaaagatagagccgatcgtctttcgtgacagcgctgcccgagtagcagccgtttttatcaaaccaatcactcggagccagcgcaatctcttcccgcttccaattcacaacatcctgtgtcgtataatgcccccaaaattttgcgccgtgccccgtctgaaacggctgccactgaaagaatacatgatagctgcccttccaataaatcacgccattcgggtcattcagcagcccaaccggcggcatgatatgaaaatgctggcggtgcggatcgctgttagcgatgggctcttttttctccacttcttcataagcccggcgacgaagctcctggtcatgtgctgtcattttttcctctcctcatcctcattaatcttcatgacaaatgctgcaatgaacgctgacactgccgcaatcgccatgccaatcagatagtgaatcaagttgctgaagccaaacggagccgcaatggcgatcatcggaattcccgttaacccgtaagcgtttgcagctacatgtgtaaagacgacatatgccccacccaatgcgcctccgatcatcgcggcgataaacggttttcggtagcgcagattgactccgaatatgacgggctcagtaatgccgagaaaagcggaaaatgctgccggaagcgcgatttcttttgtctttgcctttttcgccataaagaagacggcaagacctgccccgccctgtgcgacattcgccattgaccagatcggcagcaagtagtttttgcctatatctgcaattagccctgcctcaatcgcatggaagctgtgatgaacgcctgtcagcacgatgagtgaatacgtgcccccgaaaatcagacctgcgacaaaaccggcatggtcatatacataagttaaagcaaccgtaatgccggagccaagcgctctgcctagagggccaatcgcgataaaagcaacaaacccggtgacaatcacagtaacaaatggtgtaacaagcaaatccaccgcatgtggaaccacttttctcgtccatttctctaccttgctcatcacatacaccgcaagcaggacagggataacagttccctggtagccgagaagagcgatatcaaatccgaaaagatgcatgtaatcaggtgtcgcttccgccaatccccatggatttaaaagattcggatgaatcatgattcccccgatgaccgctcccaagtatggattgctgccaaactcttttgaagcgctgaccccgattagaatcggcaagaaaatgaatgctgcacttgaaaacatatcaagcagctgcaaaagcgcagaatccttgctcatccaatgaaacgcattgatcatacccagcaatcccattaataggccgctggctacaatagctgggatgattggaacaaaaatattagaaagcgttttcgcaaatctcgcagcgggattcagcttttcttttgccgcatcctgatgattgacgtgttcttcacgctcgatatcagcttctttagaaaaggcatcgaatactttattcacaaggcctgttccgaaaatgatctggtactggccagagctgctgaaagcccctttaacgccatcaagctcttctacttgtgcttgatctatctttgattcatctttcatcactaaacgcagtcttgttgcacaatgagccgcgctgataatattttctttccctccgagaagctcaatgaggcgttttgcagtctctttgtaatccatctatttctcccccttttatttaaacaaaaaagacctaaaattcgccaacgaataaaggacacagcgatcctttttcatttacgcaaattttaggtcttgcctgctttaccagtcacaatcccgcttattcagattaagaatacgctttcatcataaatcatgatagcgttttcgtcaactatttttttagttaaatagtttgatataacatgtagacaaaaattcgtaaaaattaattgtgaaatacttcacaatatcgtgctatactatgctcaatcatgaaagaaagcaggaaaagacaatggaaactcaagcattacaaaaggttgaacagtatgctttgaaaaaacaaaacatattcgcttcaagcaaaatccgttatgtgcttcggtccattttggccagtatatttattggttttggcattacagccgcaagcaaaacaggcagctatttctttatggctgattctccgtttgcctttccggcagccgctgtcactttcggggccgctattctgatgattgcttacggaggcggagatttatttaccggcaacaccttttatttcacctataccgcgctccggaaaaaaatcagctggcgcgacaccctatacttgtggatgtcaagctatgccggcaatttaatcggcgccattctgtttgccatcctgatcagcgcgacgggactttttgaggagccttctgttcattcctttttgattcatttggcagagcacaaaatggagccgccggcttccgaattgtttttcagaggaatgctgtgcaattggcttgtgtgcctcgcctttttcattccaatgtctctcaaaggggaaggagcaaagctttttaccatgatgcttttcgttttctgcttctttatttccggctttgaacacagcattgccaatatgtgcacattcgccatctcgcttttgatcgagcaccctgatacagtgacactgatgggagcagtcagaaacttaatccccgttacgctcggcaatctgaccgcgggaatagttatgatgggctggatgtactacacactgaatcctgatcaataaaaaaacttccagagatcactccctgcaagtcaaagcggttattccgagagatcttgaagacgctggacatgcagcgtgatatagccggcctcggattccggcaaatgtaattgatattcatttttcaaaaactccgccagctccagcgcacattgataggcgaatgaatactttttttggatgaaataaagcatctcctcgtccatacgatggagcgcttcatttgattccaaccggctgaccgcgtatcgcaaatgcgtgacaaggcgttgataggaaatgctgttttcatccacctttcgattaaagtattgttttattttctctatcatttctttgatcatggtcgtatgcttcagcgctgaatacatgctctccgcatccatcttcgccgtatggatgtgaagggcaatataacccgcttcatcttcaggcagagacacgcccaatgtctcttttacatgtccgatcgcccacaggccgatctcatattcttttttatagagcgcctttatctcatgcagcaatttattctgcacaagcagcccattttgaatcctttcgatcgcaaaggacaaatggtcggaaagcgcgatatgaatgtgatcgctcagcggcgccgcgagctctccttccgcatagctgatgatatcctcagctatttctatatgctcctccggcagtgtttgcaggatttgtttgaacttttcattctcgtcgcgcacgacaaagatcttttccactttattcatagggatgagatcatttttctttttttgaaaagcgattcccggtcccatcacgattttttcctgatcatcctcttttattaaagccgcattgttgtttaatactttatagattttcaagaggttatctctcccgccaatttgcttttgactgggattttacctccttttgaccgccatgtaaagatgcgggcccgctctctcctgctttggcgattccttgaaggcttgcaaacatcttcttttataaagcgcggcggctttcgctttctgcttttcttcctcattcacagccatccgccattcataaaacgaaacgagtcctgcggcctgcacagccgcctttctttggtatgtacgctgagccgaatagaccgcggcagccgcagtttttctgtccggcgtcacccagttcatcaaaaagaccatccacacccgtaaagatacaagcaaacgtttcatagaaaaacatccctccgcttctttttggcaggcagcctttttagcagcccgttttctcagccgcagcccgcaagaaaagacggccgatttcttttctcgcaaactagcggctctagcaaaactcatgactctatgatagaccgtggaaagagaattctttgtcacaatatgagtgaaaaaaccaactagtttttagaagttttgttgaaagctgaaagaattgaaatgaaaattggagaaccgctttgaaaactttatacacaagttatcccaaagataagaacaacttaatcacaagagatatccacatgtccacaaactctatctatattttgtatacgaacgtatattcctaactatatatatacacaggtttattcacttatacacagggttctgtgtataactccttcgttatacacaaacaaaatccaataaatggtccaaatgacacaaggatttttttgaattttcaagaaatatatactagatctttcacattttttctaaatacaaagggggaaacacattgaaaaaggggatcattcgctttctgcttgtaagtttcgtcttattttttgcgttatccacaggcattacgggcgttcaggcagctccggcttcttcaaaaacgtcggctgatctggaaaaagccgaggtattcggtgatatcgatatgacgacaagcaaaaaaacaaccgttatagtggaattaaaagaaaaatccttggcagaagcgaaggaagcgggagaaagccaatcgaaaagcaagctgaaaaccgctcgcaccaaagcaaaaaacaaagcaatcaaagcagtgaaaaacggaaaagtaaaccgggaatatgagcaggtattctcaggcttctctatgaagcttccagctaatgagattccaaaacttctagcggtaaaagacgttaaggcagtgtacccgaacgtcacatataaaacagacaatatgaaggataaagacgtcacaatctccgaagacgccgtatctccgcaaatggatgacagtgcgccttatatcggagcaaacgatgcatgggatttaggctacacaggaaaaggcatcaaggtggcgattattgacactggggttgaatacaatcacccagatctgaagaaaaactttggacaatataaaggatacgattttgtggacaatgattacgatccaaaagaaacaccaaccggcgatccgaggggcgaggcaactgaccatggcacacacgtagccggaactgtggctgcaaacggaacgattaaaggcgtagcgcctgatgccacacttcttgcttatcgtgtgttagggcctggcggaagcggcacaacggaaaacgtcatcgcgggcgtggaacgtgcagtgcaggacggggcagatgtgatgaacctgtctctcggaaactctttaaacaacccggactgggcgacaagcacagcgcttgactgggccatgtcagaaggcgttgtcgctgttacctcaaacggcaacagcggaccgaacggctggacagtcggatcgccgggcacatcaagagaagcgatttctgtcggtgcgactcagctgccgctcaatgaatacgccgtcactttcggctcctactcttcagcaaaagtgatgggctacaacaaagaggacgacgtcaaagcgctcaataacaaagaagttgagcttgtcgaagcgggaatcggcgaagcaaaggattttgaagggaaagacctgacaggcaaagtcgccgttgtcaaacgaggcagcattgcatttgtggataaagcggataacgctaaaaaagccggtgcaatcggcatggttgtgtataacaacctctctggagaaattgaagccaatgtgccaggcatgtctgtcccaacgattaagctttcattagaagacggcgaaaaactcgtcagcgccctgaaagctggtgagacaaaaacaacattcaagttgacggtctcaaaagcgctcggtgaacaagtcgctgatttctcatcacgcggccctgttatggatacgtggatgattaagcctgatatttccgcgccaggggtcaatatcgtgagcacgatcccaacacacgatcctgaccatccatacggctacggatcaaaacaaggaacaagcatggcatcgcctcatattgccggagcggttgccgttattaaacaagccaaaccaaagtggagcgttgaacagattaaagccgccatcatgaataccgctgtcactttaaaggatagcgatggggaagtatatccgcataacgctcaaggcgcaggcagcgcaagaattatgaacgcaatcaaagccgattcgctcgtctcacctggaagctattcatacggcacgttcttgaaggaaaacggaaacgaaacaaaaaatgaaacgtttacgattgaaaatcaatcttccattagaaagtcatacacacttgaatactcatttaatggcagcggcatttccacatccggcacaagccgtgttgtgattccggcacatcaaaccgggaaagccactgcaaaagtaaaggtcaatacgaagaaaacaaaagctggcacctatgaaggaacggttatcgtcagagaaggcggaaaaacggtcgctaaggtacctacattgctgattgtgaaagagcccgattatccgagagtcacatctgtctctgtcagcgaagggtctgtacaaggtacctatcaaattgaaacctaccttcctgcgggagcggaagagctggcgttcctcgtctatgacagcaaccttgatttcgcaggccaagccggcatttataaaaaccaagataaaggttaccagtactttgactgggacggcacgattaatggcggaaccaaacttccggccggagagtattacttgctcgcatatgccgcgaacaaaggcaagtcaagccaggttttgaccgaagaacctttcactgttgaataagaaaaagccctgccgattcggcagggctttttaaagatcagtcagcaaacgcctcctgcaataagcgatacgatcggagcttatcttcaaaatgatgcgtgatggtcaccaccatgatttcctctgtttcatacgcgttactcaaagctaacagccgctccttaacctgttctttcgtaccaacaatcattcgatttcgattatcagcaattcgtctctgttcataaggagaatacgtatttttccgaacagcttcatacgaaggaactccctctaaaggaataccctgctctcccgccaaaagtgtaaaatcaagcacagccccaagctcctctgccttctcctccgtgtcagcacaaagaacaaaaacagcaactgccgctcgaggcgtatctcctaacacagacggtttgaatcgcctcttatactgtctgacagtaccctctccgccctctccattgataaaatgggcaaacatatagccagcgccagattcagctgcgagcagcgcgctttctccagatgagccgagcagccacacatccggagccgttgaaatatgcggcgcagcggtcagattcggaaaacggtgtttgtcatccgccaaatcatgcaaatacatggtcagctccttaatttgctgcggatactgatcagcattgcgcttaccaccgtcattcagcgcccatgatgcaatcggcattccccccggtgctctgccaagccccaggtcaattcttcctggtgtcagcccctccagaacacgaaagttttcagctactttataagcactgtaatgcggcagcatgactcctcctgatccaacacgaattcgctttgttttcgctgctatatgactgattagcacctcaggactggaccctgccagccgttttgaaaagtgatgctcagaaacccaaaatctcttatatccaaggtcctcagcagcttgggcaagcgcaacggtttgctgtaaggccgtttctgcattgctgccctctgatactggagattgatctaatatacttaatgaaaccatccctaccacctcatcctcatcgtatcactgatcccctattttttctccaaagccgctcacactgcttatcagtgtcccctatcattcgccatttatttgtgaaagcatgtccctatttgtcggaatatgttacacgtgaaacataaaaacccctccagacggagaggtttgctttagtttttattaaagcccttttctttcacgtagtcatttaaatacgtacgcggcttttgcttcataaagttcagtatttgatcggaccacgtttcttcccgcttcccgtttgttctttctctatagtaatcagaaatggttttgtcatacgtattcatagtatgacggaaatcgtctgtgttcacattatacgtattttcatgataaacggcctgctttggcaatctcggttttttgccggaaaggttcgcaggatggcctactgccagtccgaaaagcgggagcacatggtcaggcgtttgcagcacctctgtcaccttgtccaattcattccgaatgccgccgatatagcaaatgccaagccccatggattcagcggcaatgctcatattttgcgctgccagcgccgcatcaatcaagctaaccataaacatttctgtattctcgagcagctcagaaatatgttcacctttttcctcagccagttgttgatggcggtacaaatccgcacaaaatacaaaaaagtgtccgttcttctcaacgtaaggctgattcccagcaagcacggacagctcacgttttttctcaggatcagaaaccccgataatcgaatatgcctgcacatagctggatgtagacgcagcctgcgcacttttcactaatgtatcaatttcttcagctgtcaaaagctgatcagtaaaagaccggattgaccgatgattcaaaatggtttcgattgtgttattcatcacaaaaacctccttatcactttttatcatatccgaaaaaaagtgatctcaaaagtgaaatgctctgcacaaaaaaagacagcctctgtaaaggctgtctgcatatcaagaattaaaaagataacttctgtatttcgtcagctgcacacttgcattatatacaatcccaaatccgattaacgtggaaagtgtcgagcttcccccatagctgacaaacagcagcggaatcccggtaacaggcataatgccaatgttcattccgatattctggaatgtgtggatcacaattaacgccgtatagccaacgcaaaagaaagaagcgaaacggttaaacggatgtattttgtctatcagaacaacaagcctgtagattaaaaagaagaacatgatgacaacaattgcacagcctataaagccaaatgactcacctattatagaaaagataaagtcagtcgtactctctggaacataaaccttcaaattagaaataccattacctaaaataccaccagatcctattgccatgatggcctggtcaacttgccagctgtcatttgaatcttcctgtgtctcatttgaagcagacacccaagaagtgacccgcttaatttgataatcctgtattccaactgatttagcaacgtcaggaaagtttatcattactaataaaattaatgaaatgagtaagatacctgaaccagctatgatcgcaatcaatttccaatttatccctgacataaaaaccattacaagaacgataaacatacatattcccgcagtcccagcatcctgcatcaggataagacctacaggaataactgcgacacccgcaatctttaataacaagtggatatcatccctaagcgtccgaactcctttaggatttgcttttccaataactgaagcaagcatcataatcaaaccaaccttcataaactctgacggctgtattgttattctaccgatcctaaaccaactttttgcccctttaataacaggtgcaatagactcgggactgattttaagaataatcaaagataaaataccaatgataaaaatatataaacttaacttttcaagctgttctaaatcaaagtacaaaagaactgtaatggctacagcccccaaaagataaaacacaatttgctgaatccaatccgtgttcccatactgcccaaactgaccggcagcatatattgatactacgcttataataaaaaacacaccaaatataaaaatcaaatccccctggtaaaaggggctttgctgtttcttatatcgactcattctatcccgccttacattttcatcggaaaatcactaatgtttattatacatgaaccacgttcaagatgacacgtgaagctcgcttccttttatgttttttcagcatttgcggcgctttttcagctacacgaaatatgacgtatcataaaccgaaatgtttcgattgacacaaaacttttcaaatgaaaaaaacgccataccaatagaatttgttaaaaaacgaatgcgataatgtgttatgttcccaaataatgtgatacctcatatagaaatagctaaaaattcagagccccatgcccatacattctcctagcacattaaacgaaaaaataagacgatagatccagtccatttctgcaaaaacacgtatcaatttctggaaaacatggtataataattgtaacagaatgttcaaaaaacaatcacaaaacagacacaactcagttcctctatttcatttttgtaaacgttatcacaaaatgaaaggagacgggtatgatggacatgttttttgcttacttattggttgccagcgcaacgcctctctttatttggcttgataacaaaaaagtcgcactctcagctattccgccaatcattttaatgtgggtattcttcttcttttacgcaacagaaagcctttctccacttggacacactctcatgattatcttgtttgccgttaacgtcattgtcgctcatatcgccgcatttatcatttacggccttccgtatcttcgcagaaagcgaagcagctgaagacagcaaaaaaccctcttccactgaagagggttttttgtattattcgttatggcctgaatgctctgagtgttcagcgcctccaggaggatttccgtccatatggtcaccatggtgatagtgagccgcgaaaatccagatggatccaagtacgataacgatcgcgccaaagaatccgaacagcgtgtttccgacttggatcgtgccgttttcgctctctgtcatatgcatgaacatgagaagctgcagcgccgcctgaatgaaggcgaagccgaagataatccaaagttttgctgatgagctcaggtcagtatacactgcaacccatagagccagcagggtcaaaacgatagacaggataaaacctacaatgtgtttccatggaaagtgactgtgttcagcagatttgtttgccattttacagaccccccaatcccatgagatagacacctgtaaagatgaaaatccatacaacatctaagaagtgccagtacaagcttgagataaagattttagatgaagtttgcggagttaagccgcgtttcttcaactgaatcagaattcctgtgatccagaaaatcccgattgttacgtgagttccgtgagttccaagtaaaacaaagaatccagaccagaacgcacttgtactgagagccgctccttcatgtacatagtgaacaaactcgttgatctcgcatccgacgaagccggcaccgagaagaagagtgataattgtccaaatgactacgccttttaaacttccgcggcgcatttcatgaacagcgatcccgcaggtaaagctgctgatcagcagcaagaacgtcataatcattaccagattgacttcaaatagttcgtctggcaagacacctccagctgttctgtttttaagaacgaagaaggttgcaaatagtgttgagaacaacacaatttctgcccctaaaaagatccaaaacccgagaatattaagtctgccggtttcagattgatattccataggcgcgttagaattgccgtgttctgcatgttccataactcacgcctccttattcggaaatctttctttccgtctcttttatttcatcaacactaatgtagtagccgttgtcgtattcgaatgaacgcagaaccatgcagagcaggactccgatcaatccgactacgcccatccagtaccattcaaagacaagtccaaagcctgcgagaccgaaggcaacagacataaagaacggtctgcctgagttgcttggcatatggattttcttgaatttgctttcagggtataattcagttttttcttctttcatatgcaggaatgcatcttgagatttgacttcaggaagcaccgcaaagttgtaatgcggcggaatcgcagaagaagtcgcccaatcaagcgtacgtcccacaccccatgaatctccgctgatttcacgagtagagtaacggaagctgtagtagatgttatagcaaaggattaagaatcctacacccatcatgaaagctccgactgttgagataaagttcaatgttgtccagccgtcattcggtccgtatgtgtaaatacggcgcggcatgccttgaagccccaagaaatattgcgggaagaaacaaatattgaacccgatcataaagatccagaagaaccattttccgattctttcgttcagcttgtggccgaacatttttggataccagaaaataaatccggcgaaacaagcaaatacagtacccgcaatcagcacatagtggaagtgagatacaaggaagtacgtattatggtattgataatccgctgctgccatcgcaagcataacccctgtaaccccgccgataacgaagttaggaatgaacgcaagcgcccacagcataggtgttgtaaagctgattcggcctttatacattgtaaagagccagttaaagattttaaccccggttgggattgagattgccattgtcgtaattgagaagaatgagttaacggacgcactgttccccattgtgaagaagtggtgagtccaaactaagaaactcaatacagagatggcgataatagaaccaaccatcgctttgtaaccaaacaattgttttcttgcaaagcttgagatgatttctgagaaaataccaaacgccggaagaataacgatatatacttcaggatgtccccaaatccagaacaagttagcccaaagcatcggcataccgcctgcttccaatgtgaaaaagtgagcgccgaacaaacgatcaaatgataaaagtgctaatgctactgtaagtacagggaacgcaaacacgataataaccattgtgatcagtgttgtccatgtgaacatcggcatacgcattaatgtcatgccttttgttctcatttttaagattgttaccataaagttgatccctgtcatcagggtaccgataccggcaatctgaagtccgaggaggtagtagttctcacccggcccagggctcatgtcgttacttgcaagcggcatataactcgtccagcctgcgttcggagaacctccgataacgaaagaaatattgaaaagcatcgcccctacaaagaacgtccagaagctcaggttgttcaagtaagggaacgcaacgtcgcgggcaccgatttgaagaggcacaacaacgttgataagaccgattaagaacggcatcgccatgaagatgatcatgattgtaccgtgagttgtaaaaatttcattatagtggtttgagtctaaaaaactgttattcggaagcgctagctgggcacgcatcatcagaccgtcgacaccgccacggaataacataattacagcagatataatatacatgattccgagttttttatggtcaacagtagttatccattcagaccacagccatttccactttttgaagtaagtcagaacaaaaataatggcaatggttgaaagcgcaatggaaacttgtgcgcccagaattaatgggtcaccagttacgaaaaattcgtcccatttgaatttcatgcaggcttcctcctttcctgatcaatatcattcttctgtatcatcagacttcttaaattcgtttttctttacgttttcaaacggatctgttttagaatgcggtgaaacggcttgatagccaaggcgtttgcgcgcctccatcgcgtactcagcgtcttgtccgtgatcaacgtatttcaagtgagtagaagagaacgttaattcgtccacattttcaggaagcatcaattcatcatacttctcttttgtcagcttaggagcctcgttctgagtctttttcacccagctgttaaagtctttttctgtgactgcattcacatcaaactcttggtctgcaaaatgttcacctgtgaagttcgcgttgcggccttcgtaagtacccactttgtcagcctgtaagtattgatccatcagcattcctgccatcgcatatttttgccctccaagctgaggaatccatagcgaagccattgaatctgcagatgagattttgaacaagatcgggcggtcgacaggaatgtttaagtagttgaccgtttcaatatcctgttcagggtagctaaatacccatttccagtctaccgaagtagcataaacaacaagaggctctttgtcttttgttgcttcaggagctttttctaacgaatatatcgtctgtactgttggcacagaaagtgcaatgacgattaaaattgggatcactgtccagactacttctaaaaacgtgttaccgtgaatttctgggttataagatccattatctttgcctttacggtcgcggtattttactaaaataatggtaaatagaacaaagacgaccccgacgataaacagcataaatccgatagataacaggattaaatcactttgctgttcagctacaggtcctttcggatctagtactgaagcattgctgcatcccccaaggacgaaaaccacagttaacagcgctaatacaagcaacggttttaatgctctgaacaagaagatcaccatccttcctattgatgtaataaatctgaagtgcatacttcctcaaaatcttttctctactttgttatgctatcaaaaacttcacttattagctttatttttttataaacttcatcccattttcgcttaaatgtcataaaatcgacaaaaattgctccaactttattcacatctatcgcttaagatgaaaagtttctagttatttccgcatataaagtaaagaaagatgatgaagaactaattctgacaaattaaggtttaccacaataaaaaacttaggtcaatcaaaaatttcattttgttaaactttctagataggaattattttttcctcgtctagcatcttttcacacggttaccattttaacgcatcaaatattgaaagaaaaggcgcaatgaagagccaatatgctctgaattgtccgtatttttttatgagagcatccagttgtttatcttatacaaaaaagaggaatgatataagcaaataaataaaaaataggatgtgttgcatgatgagttttcttatttcacttatcgtcgctattattatcggatggcttggaagcctgtttgtaaaaggagatatgcccggaggaattatcgggtctatgatcgcaggtcttataggcgcctggatcggacacgggctgcttggaacatgggggccgcacctagccggatttgccattattccagcggtaatcggcgcagccattgttgtctttctagtaagcctgttaaccagaaaaagaggataaaagcagcagcacccgaagcgtcagcgctttgggtgtttgttttgccataaaaatcgaaaaagcctcaaccctagcggttgaggcttttgactggtttggcgcccaactgatcgatgaaccttctgaaggcctgttttccctctgctgtctgcttaaatacaccggcgtgttcaaggatgcgcgcgaatacatgtcccagctcttcttttatgactagatctacgttctcttttgttatggttcttttttccatcgtccgaagagcccactcactatgctttgcagtgagcggattttgttctaaggctgttttcggatcagcagaacatagcgccgctgccgtttctttcatttcctcctgtaagcggccaggcaatatcgccaatcccatgacctcaatcaggccgatattttcttttttaatatggtggacttcttgatgaggatgaaatattcctaatggatgctcctcatccgtccggttgttcctcagtacgatatcgagttcgtacaagtctcccctgcgccgcgcaatcggtgtgaccgtattatggggcgtatcgcctgtataggcggcaatgccggctttttcatcggaatacgtctgccacgtgcggaagatatggtcagcagcttcggcgacatgacccggttcgtctccttggagcctgagcacagacatcggccacttcactaagcccagcgacacgccgggataatcatttaattcataaacgtcttccgcttctgcacgtgccattggaaaatcatgcgcgccgccttggaaatgatcatggcttaggatgctgccgccgacaatcggcagatccgcgtttgaaccgataaaataatgcggatattggccaagaaatgacagcagcctttcaaatgtttttttgctgatctccatcggttcatgttcaccttttaagacaatgcagtgctccggataatagacatatggcgagaattgcaggaaccattgttcgtcctcaaggatgaccggaatgattctgtgattttgccgggctggatgattcacgcttccctcgaagccgacattttctttacacagcaaacacatcggataatttgtctgttcctgctcttttgcagccgcaatcgctttcgggtccttttcaggctttgataggttaatggtcatttccagctcgccatattcggtcggcaccgtccaatgaacatttttggcgattctgtcagtccgtatataatagacatcctctgaatattgatagaattcctttgtcgcctgttttgggccgtataatgcttttgtctcttcaaatttgcgaatgacctcggacggggcaggcacaaaacagcccatcagctttgcgctgagcaggtcacggtacgtatctgtatccgcttccattcggccggtttcggcagcccatttatagatgggagctagcaagtccggcaggctttgtgactgcttgatgctggtgctggagttcggctcgggatgtgtgatgcccagcgcttcataaagacggtttctcgtatattcccgatcccagatcgaaatcaattttcgttccaggccatactcaagcagctgttccagatgttcaataatactcatatgtcactccccctttagttctctcgctccctctccgatatccgcgacataaaagtccgctcggagccctgttttttcttgatatctgtctccaaccttctgaataaaatcatcaacgaactcatcttttacaatgctgatggtgcagccgccaaagcctgctcccgtcattcttgatccaattacaccttcgtgatcccatgccgcaaacacaagctcatcaagttcagggcatgttacttcatagtcatccttcaatgaaaggtgggattccttcattaactgcccgatttcatctatattgttctctttgaacatatgggccgtcttaatagcacgatgattttcgtatacagcgtgctttgcccggcgtctgttcgtttcattttggatcaggctggaatgcgcatcgaaatcagaaggcttgatgtcgcccagtgcggcaatatcgaggccttttttcagatcaagcaatgcatcattgcattcttggcgtctcgtattatagctggagtcagccaatgtcctttttttgttcgtgttcgcgatgaccagcgcgaggcctgagacattgagtttgctatattcatagtcaagcgtgtcacagttcagcagcatcgcatgatgttttttccccattccaattgcaaattggtccataattccgcaattgacgccgataaaatggttttccgcatgctgcgccattttcacaagctcaagcgcatctacttcaggatgaaaataactttggagcacgacccccatcagcagttcaatagaagcggaagacgacagtcccgccccgtttggaatattccctgaaaatacaatgtcaaagccatggggaactgcatatcccctctgttgaaattcataaatcacgccttttgggtagttcgcccagtcgtcttctttttgatagcgaatgtcgtcaaggctgcattccttgatgcctgcgtttctaaagttatctgaatacatccggacaagcccgtcgtttctttctgcaacagcagcatatgtacccattgtcagcgcgcacggaaagacatgcccgccgttatagtctgtatgttctccaatcagattcactcttccaggtgcgaaaaaaaaccgtaacccctctttttctccgaatacacttgcaaatatcccctttagctcttcccgcatgtgcaatcacctttctggtttttattttttattccccttatttcttcatagaaaacggcagatcatatgctgcagtcctctcataccccttcttcttttgtttttttaaagacgagccatttgctcgcaacatagttgacgacaacaatgaccgcgttgtcgagtattttggccaaggtttcatttgtattgaactggccgacaagaatgatcatcatgcctaaatctatgccgagagacaggacccgaacgctgaaaaaagcagtgagctctttcagcaggctctgcagatcatgtgttttttgctgaaacacatataatttatttgttatgtaagcaaacagcacggacaaaatccaagcggcaacagtggcggctttgtaatccacattcatgatctctaccaatatataaaagctggcgatattcacaatggttgtgaaaacccccataatgatatacataattatttctctatacttcactgatgttcctcgctttctgaaaaacttttcaaaattcttggcctctcgtgctctctgtctaaagtaaaaaataccgagagtgcgtctaaaaagctgcggaaggtggctggctggcccaatacatatgattgtttgatgattccgtcgaggactgcacatattattttagccgtatattcaggatcaatacaggcgtcaatcagctttctctccttcagccacttaatatataacacattttcttccacccacaattcgtacagccggacataggccttgcatttctttaagactttatatgtcggcatgttcatggcaaacgaggtgatgtcccacgacggcttatttatgtaataggaataaagcagttctgcagcgtgttttgcagcctcgtccaatgtcagcgatttcactgactcccgctccatttgatcaagataccctataatgatcttttttttcatctgacgtttttcgagaaggtacagcagaaaatcgtccttgctgacaaaatgaacataaaatgctcctttgctgtacccggcggctctgctgatatcttctacagaaaccggatcatacgctcggtcaatcaacaaattcacgccagcgtctataaaactttcaaatgttgcttctcttttaatttgaaatttgttttttttcatatttttctcctggcggtaatgattacccttatcttacaccggatcaatctttagcggtatttatttctttaaacggttatgctattcggtttcccaggggtcatttttaataggctaaatgatttattttcatttacatactatccagtcagtatttaattgtttattattataaataaggtccattggttatattagtcatttttttagggaataggtaggtggtttttccttcagtttgtgaacaccgagcaactatgtgtgaaatttgttgtactcgcctccatcatcgcgctggcttgtcttttattgcccgcatgttgcaggaaaacattttatacaattggaggttactatgaaaactcatgttaaaaaagatttggacaaaggttggcatatgttaattcaagaagctagatccattggattaggcattcatgatgtgaggcagtttttagaatctgagacagcatcaagaaagaaaaaccacaaaaaaaccgtccggcaagactagtccgaacaggcggatctatttacctctggcttttctatcacctgatctgagttttcaccatatcctctattcaaaagcaaatcgctgcgctgagcttgaggacaaacggtgtgtcagctaactacgacagacagccggtgatgcgatcacctcttggcacatgcattgtcataaagaggtgatgcgaacatgataaccgtgctctggtaaacagcagctttgctgagaacaagctgcattcggtgaggttttgaaagcaaactcgtttatacacggccgagcttgaaaaccttcgcctgtctttagaccactgtgttcacctcttcacgacttccttcttttttcatcctccagctattgtacaacgcataaatcggactttcagtacatacctattggtgtacctttttgcttacgtttagcgaataaaaggaggaaagccatgtacaaagctgattataaacagattgctgcaacgccgtcttttcaagcttttttaaagcagaaacgcgcttttattgttccttctgcgattttcttttttgttttttatttttcactccctgttttgacatcttatttcacctttttgaatgcaccggccattggagctgtttcatgggcttggctgttcgccatcgcccaattcgctatgacctggatactgagtactgtgtattcccggagagccgcccatttcgataagtatgtaagcgctttaaaagaggatctgaagggtgaacagacatgaatatgactgcttttttattatttttggcgattgttggcctgacgcttattatcacgtattttgccgcgaagcggacgaaaacgacgagtgagttttatacggcgggcggcgggctcaccggcgttcagaatggactggcaattgccggtgactacatgtctgccgcctcgtttctcgggattgccggaatgattgcgttatatggatttgatggcttcttttacagcatcggttttctggtggcttatctcgttgtcttgtacatcgtggcggagccgcttcggaatcttggaaagtacacgatggcagacatgattgccgctcgctttaaagaaaagaaaatccgcggtgtcgcggctctcaataccattgccatctctactttttatatgatcgcccagctcgtgggggcgggcgcgctgatcaaactgcttctagggctggattataccgcggctgtcctcatcgtcggagtgctgatgaccatttatgtcgtgtttggcggcatgatcgcgacaagctgggttcaaattattaaagctgttttgctgatggccggcacactcgtgatttcgattatcgtgttttcgaaattcggctttagccttaataccatgtttgaacagatgaaaacggctactccgcttggcgctgattttttgaaccccggaaataaatacaaggtgccgcttgagaccttgtcgttaaacttggcactcgtgctgggaaccgccgggcttccgcatatattgatccggttttataccgttaaggatgccaagacggcccgtacatccgttgtgtcagcgacatggattatcggtgtgttttacattatgacggtatttctcggctttggtgccgcggcatttgtcggttttgacgcgattacggcggctgatcaagcgggaaatatggcggctccgcttttagcaaaagcgctcggaggagactttctgttcgcgtttgtatcagccatcgcctttgccaccattttggctgtcgtgacagggttggtgctgtctgccgcctcagcatttgcccatgatatttacagccagatcatcagaaagggagaagcaactgaaaaagaacaaatgaaagcggccagatgggcttctgtcgccgtgtcagtgctctcgattctccttgcgatttttgcacaatccttaaatgtggcgttccttgttgcactcgcgtttgcggtagccgccagcgcaaaccttccgctgattgtgtttacagtcttctggaaacgattcaatgcctcaggcgctttatggggcagcctgacaggcctgatcagcgcgcttgtgctggtatcgatgagccctagtgtgtgggacccggccggaggtgctatttttaccggtgatccgctcattccgctatctaatccaggaattatttccatcccgctcggctttctcggcgcgtggctcggaacggtgctgtcgtctgataaaacaattgatgaagatacgtttgcagaaattcaggtgaaggcgcatactggcgtccatatggaacaggaataaaaaaagctctctttatcgagagctttttccttactttttcttctgctcgtcagaaatcgctttttcaaatacatccttgccggcagcacccggaattacagtgtcaccgataataaaggttggaacggctgtgatgtcagcctcttcataggcgtgcttcaaggcttggcgctgcacgtcctgatatgttcttgtttccagtgctgatttgaatgatgcaccgtctaatcccacttcctcggcgagcttcgtcaagatgtcaatatcgccgatattttggtcctcctggaaaaatgcctgaaagacacgggtgttgtattcatgtcctttattgtattccttcgcaaaatggaagccttcaaacgcgaggtctgtatacggatggggcgagacgtttggaaaattgatctcgactcctaatttctccgccattggctgaattgatgtctgccacatgtactgtttagaaggatcattgaccggatcaagctgaggagatgggcttgggcgcagttcaaacggcatccactcgacttcaacatcctttccttttatcgcttcttcaaaagcggcttttccaacaaaacaaaatgggcagacgtaatctgaataaactttaatgtgtactgtcatgataatctcctttcatactaaattgattttaaactgtaacaattaaagttacaactgttttttaataaagaagccgatttaggcttctttcagattgatgacaaaatcctaaaaagttttaggattttgtcatcctttcagcgtgattgaaaacccttgaagtctaggaaagccgagcattggagcggagcgaatgctctaattcgtgagcaccaacgcacaggcttgacaacgaatgcgagggtttgtcgacacgctgaaagaagcctgtaaaggcttcttttatgattccagcaaacgctgggcaatatattctccttttttgcagccgcctgggcatgcgtataaagcagaaccgattgtttgtgtatattcgtttaacgcatcctttgctgaaagagccttcagcatcgggataaactgattgtcgggatttttttgaaaactgataaacaggagacctgcatccatatagccggttttcggatcaagtccttctgtgtaagagaaagctcttcgcaaaatttgtttcccagtagatttcgctagactgacgtgtgaattagacggaatttgattcagcttcacgggatctgtttcctttttctgcccaaaaggcgcccccgagctttttctgcggccgaaggtatcctcttggtccttgagggaagagcggtcccatacctcaaggaacattttgattttccgaaaagccatataggtgccgcccgtcatccagtcaggctcaccagactgaatccacacgatcgagttcatcaacgtgtcatccttcgtgctctggttgcctgttccatctttaaacccgaagaggttgcgcggtgtttcaccattttttccaccgcttaaaaagcctttgttcacaaaacggacctcacaagtgccgaccgcttgatttagcaggttacgcagcgcgtgaaacgccacttgctcgtcgtctgcacacacttgaatgcagatgtccccgcctccctgcttttcatccaggttgtcattgggcatcgctggaagagcggctaggtgcttcggttttttgcttttcagtccgaagcggtcctttccgtctttttcaaaaaagccaggcccgaatccgaatgtgaccgttaagttggaaggggataaatcagcagactcacctgtatcctgcggcggcagatactgatttctctgctccgctgacattttcttgccagacgtcagcatctgtgtgagacttgtccagtttctaaataacgtaatgatgtcgcttttgtcttttgctgttacatccagtgcagcaaaatagacatacgtctgatgggcagttgtgattccggcctgatgctttccgtaaaacggaacaatctgctcctcctctttttcatcctttttcgatggcttagccgcagtctgaacaagcggagcgagaccgccgagaccgctggcaccgatcgcaacggctgcccccgccatcgctccccattttaaaatgtcccgtctgtgaatttgttctggctttttctgttcatcgctcatgatgttacaaaactccttttatagcacattcgcaatcttcgacatggtttcagaaagagtcgtcagcttagtgctcagctctctgatttgcttttcacttaatttatcataagacgtataggactgatcatttgttttgtattttgccattaaaacttcaaattcgctgaactccgtatccagtttttccgtcaagtcggagtgatcttttacaagcgcgcttttcactgtttgataaacggcttcggagccttccacatttgccataaggtcaactaaatcaattcgtgagtagcgctcttcttctcccgtgattttcgaaattccggcttcgttcagaagctccatcgcgcctgcaacaatttgttcaggtgttaatttcagtgattgaattgaaccgtcaagctcttttacatccttgagaagctggtcagctgttgccttttccccggaaatatcttgatccttccaaatggccttctcaagcttatggaagcctgtccatttgtctccttcttcaacatcgttttctcgtgcgtcaattttcggatcaagatctccgaggctttcagcgatcggttcgattcgctcgtaataaacacgcgctttcgcatataacgttttggacttttcgatatcgccggatttcacagcacccgtaaatgcttcagtcgctttgacaagctggtcactctgctctttgacatagcctttatactcatccgctgcttttgccagctgatcgctagcctttttgccgctcttcttcgcttctgtcaggtcttctaaggatgctttcaatgactcggattctgtcttgatttttcctgcatccggtttgtctttttgcgcttctgtgtagattggctgaagatgcttttcgatttctgtatattcgaatggatagtcgctgcgaatatcgttttcaaaggaaagccagtagctgtttaactctttccccttcttttcaatctctttttggtctcctttttccactgagtcattcagcttagaaatgatggtttccattttatttacggatgcggtgatttctttagtgaccccgcttttttcagatgaagctttttctttggttgaagatgtgtcattggctccgcagcctgcgcacagcgcaaggatgcatccggctgatacagcgatttttgtgaaattcattttgtcagttcctttccgtttgtaaaatgttttgccgcttctgaaacaagcgcaatcagtaaaaagagtaaaatcaacatttgcggaatcgtgctgtacacagacggataaattcctagcaccgatacagacggcagccagctttctgcatcagacggaagaatgcccgccagttgaaggctgtgaacgccggttccgagaaatttcacgcacatatacaggacaaccgccattgatagaagaaaaaacggcttcaatggaatgcgcattccgagcttgatcatcagaacaccgacgatgacgagaacgataagccctgcggcagttccgccgatcagttcagtgagcgggagcttcccgacaagcccgatgaaaaagatgaccgtttcgagaccttctcttacaactgccagaaatgcaatgagcgcaaaggaaagcaggcttcgtttttttagtgcctgtgacttctggatattgattttttctctccatttatccattgaggcgtttctgtgcagccacaccccgacatacaaaagcatgacagcggacagtacgccggtaacgccgccaagcaagaaattgttttctccgaatacactggaggagaacagaaccgtgacaccgatgccggctgctaaggaaacagccatgccggcggacgccccgccccagatccatgtcgaggaacgcgtaacccgcgctttttttgtcatggttaatagcgctccgatgacaaggagggcctccattccttcacgaaccgggatcagcgccgcatcccaccagctgtagctgcttgaagcgatcggctcgagcaattgaatcatttcgtcaatttgctttgataccttttcaggatggctgccgatctccgccttcatcagcgccagattttcctccgatgtcgtataggcttctttcgattgggacacgacatctccctcaacagcgagccaggatgtaactaaattgtcgattgcggatgacgcttcatccaattgttttttttctatgaactgttttgtgtctttcaagctttgtatataggctgttaaggacgcccttgattgacctgaggatgtctttttcagcacgacagcctgctgataggtttctaaatgagacgcaagctcttcaagctgtgttttgagcttacgtgcgtcttgattgataaaagaaagagaaatcatcgcgatattcgcgtccatttcactgtgagaagaaaggttttctttcttaatagaaggttcttcttttttccacttcgccttgaaggtgtcaaacgtttgttgtgccgaatccatatccccgtcttttacggatttgatcatttgcttgtttaattgaattaatgcggcgatcggatcatcttccgcatgtgccgcagaaccgaaaaccatcaacaagctgaatagaataagtgccagcccccgagccatcatgttcctcctataattgaaaatgattatcattgtataacataatcatagccagttcctgtcctttgtcaattaaaatttgaaggtctgaaaaccttgatggacagcaaaaaagctgtccttttacagaacagccctttgaaggaaaatgaacgattatcttcctgttttatacgtttgaatttcctcacgaaacttgcgtgcagcactctcaggatcctccgcctgactgatggcgctgatcatactgacgccatcggcccccgcttggataacaggtgcggcattatctattgtgattccgccgatgccgacaattggaatgctgatgccttggcggcgcactgcttcgataagagatacaccctgtaccgctctcgtatcttttttcgtttcagtcggatagatcggcccaagcccgacataatccgctccgtcttcttcggcttgcttcacctcagacatcgtatgggcagaaacgccgagaatcatatcacctatggcagctcttacctctttcgcatttgcgtcttcctggccgatgtggataccatcagctttcagattcagagccaattccacatcatcattgacaatgaacggaacaccagcttcacggcaagctgcctgcgctttttcagcaaatttaatccgagcctctcctgtcagcgcatccccgcctttttcacggaactggtacagggtggcaccgccttttaacgctttttgtacaactgtaacaggatcggctttcgtattgtttgaccccataatgaagtatacagataataactctttcatcatttcccgagaaatacgagtcatgagacagtcaccctttctatagtcgcccattcttggacgtcttgttcagtaacagttgaaagcttgttcagcaattcaatctgaaagcttccagggcctttgtcagccgtctgctgtgcggcaagctgagcggcgaccccatacgaagaaatggccgcaatagcagcaaacaatggattttcttccacagcgcaaaacgcaccgacgacggaagtcagcaggcaaccggcgcctgtcacttttgtcagcagcttgtggccgttatgaagggtgtatacatgtgacgtgtcggctatgacatcaacttcaccagttatcgcaatgaccgtgtttagcttttgtgccgcctgctgagccagccggatgatgtcgcctccaccttcacccgcatcaacacctttgatcagccaatcggtcacgccgacggtatgggcaatttccgccgcatttcctctgattgcagcaaggcgcacctcacgaatgatgtcacgtgccgattcagtgcggaacggtgttgctccggcaccgacaggatcaagaatgacgggaacgccatgttcattagctgattttcccgcgatgatcatcgcttcgactgactccttgctcagtgttccgatatttaaaacgagtgcacccgcaattttcgccatatcggcgacctcttcttttgcgtacgccataacgggcgatgcgccgagcgcgagcaggccgtttgctgtgaaattcgttacgacattgttggttatgctatgcaccagtgggctatgccggcggacagccgtaagacattttgctgctgattgtgcatccatatttgcatcatcctttactatcttttttcgggtcccataaatacgatttcgtatgttcgagccaagctctggcggcaaacgacaagtacctgtcctttctccaaataatggcgaggtgccaagggatgaccggatcgacaagcggaatgactttcactttttccgggtcaaggccgcggcagatccgttccggcaaaagcccgatcccaaggttggcggataccatctcactaataaaatcccattgtgatgtttcataaatgatatggggccggaacccagccttgatacattccgtcataattcggttgtgcaggacaaaatcctctctgaagaaaataaaaggctcgtccttcaactcacgcagctgacattctttctcatcagccagccggtgggaagggtgaacgacaagcattaaggtttcttttacgattgtaaacgaatgaaagatatcttcgtttgcgggaaggaccacaacgccgatatcaagagagccgtccccgacaccttcttggacttttatagaaccgtcttcgactagctgaaaggtgacattcggatagttttcacggaaatcgccgagcactctggggaaaaaccccgatccgatcatcggcggcagtccaatccgtacgtgccctttcttgacttccataatatcatttaattctgacgtcaggttttgaaatgatttaatgatttcctgcgcctgcacatacatgctatgaccggcatcagtcagttccacctgcctgccgtttcggtaaaacagttcaattccgagctcttcttctaaatttttgatcatttttgatatcgtcggctgagaaacataaagggattgggaagccttcgtaaaactttttaaacgggcgacttccaagaaatatgttaaatggcggatatccatgcgcttcaccctttctatagacaaaaggaatacttcttattcttaatatatattttacctatagagagaccttatgtacaataagtatataagggaggcatcaatatgaaaaaactgttgctaaccgttattcaaatcgctctgttatttatatttgctcggctgattaattgggtgacagcccttcttcatataaatattcccggcagtataatagggattgtgattcttttcacattattgcactttaacattatcaagcttgaatggatcgagcttggtgcagcgtggcttctcggggagctgcttttattttttatcccgtctgccgtcggagtgattgaatacggagacattatgtcgaaatttggtgtcagcattctgcttgttgtcatcatcagcacgtttgtcgtgatggtgtctacaggaacgcttacacaactcatcgcaaagagaaaggagaaaaagcatacgtgttcatcggaattgtaagtttgtttttaacggttttggtgtatttaggagcaaaaaaggtatatcaacgctttccgcgtgtttatacgtcgccgctattggtgacgcccgctgtattagtcggtctgctgctgctggtgaatgtcccgtacgagtcctataatctcggcggcggattgctgaccgatatgctacagccggccaccgtggcattcgcgatcccgttatataaatatttccctgttttaaagaaatacgcagtggaaattattttgaatgtggccgtcggttcatgcatcgcgattatttctaccgctcttattgcgaaatggcttcacctcggcaccggcttaattgacagcctcgtcccaagatcagtgacaacgccgatcgcgatgaacgtatctgaaatgatcggcggtatgcctgccgtcacagccgtgtttgtgattttaaccgctttgctcggcacagtgatcggcccgatggtcatccgttatttccgcattgataacgaaattgcgcggggcgtgctgcttggcacaagcgcgcacggagcgggaacgtcaaaggcatttgagctcagctctgtgtccggcacgatttccagcgtgtcgatgatcttagctgcgattatgacgctttgcgcggcgccgtttttgctttcatttatgtaaaaaactgtcctctcgagggcagttttttttatgtgcttccccttattgaaaagctggcgaattccaatataatgtatttgtggataccaaaggaggcaccctgatgcacaacttgcaggtgaggcggcattatgccgcgttaaaaggattttatttgtttgcttttctcggtacgggcagcataattcccttactcagtatgtatttaacgaaggaacagcatttaagcggatcacaggtcggcttgatcatgtcactgggcccgattgtgatgattttctttcagccgttttggggcatgctgagcgactatacgcaaaaaacgaaaggcctgctggcggtttgcacatcaatcacaggcatcattggattagcctatattgcatttgacagtttccctctgtttattttgattgcggcctgttttgcagcctttcaaagcacgattattccactttcggacagcatttcactaaggtacacacaagaaacaaacggcaactacggcggaatccgcctgtttggttctctcggcttcggtgtcgcggtgtttgccatgggacaggtgacgaaccagctgtaccccattcacgtgatctttatctttggctgtgcctttctgtgcattgctgccatattggcttcacaagtgcccggccagcagaaaacaacaaaggtcaatatccgcaaaggattccgggagcttatcagcaacaaaactttcctcatctttatgatcatcacctttacgacatttgctccaaacttagcgaacaatacgtatttcagtctttttctggacaaaagcggcgcgtcactttccgctatcggcattttatttttcatcggtgtcatttcagaaattccatttatgagattcgcccaaacatttatagataaaatggggctgctcaacgtcattatgctgtcaggcggagtctcattattcaggtgggcgctctatttcacggcgccttcactatggatcatttatgcgacggtctttcttcagggagtggccatcggtttatttatcccggcggcgcttcaatatgtgaaaaagattaccccaagacacgttgaagcgacggcgctgaccatgtacgccgccattggcaacgggttcggcaactggttctgcacatttgcaggcgggtacatttttgactacgtgtcgatcttcgcagtctacttgctttttggcattctgagcatagcaggctttggcctgacattatatttaatgaaggctgaaaaaaacaaacatacacttcatcagccggctgttacttttaaaccataatgactataatgaacaaaagaaaggatgtgcgttatgaacgggcaagagcgaaacagcatttcgaaagggttgcaggttgatattgtattgaaagcagatcaaaaaacaggaaaactgacgagagggacagtgaaggatattttgacgaaatcaaactttcatccgcatggcattaaagtccgtcttgaagatggccgcatcggccgcgaccagcagatcgtttctacataaaaaaaagctgcccctgaacagggcagctttttcattattttttctgcagaaggaccactttcaggtagttgccttccggaaatgccgaaatcgttttgaaatcctccggcagcgtaaattcctcaatgatcgtgtagcgttcatttgtttctttaaaggcggcatcaataaagcctttgaacttcttcatgccaaaggcgctgctgtttgtagaggcaacaatgacacccttgtcagcagtgatggcgatcgtttccttcagcaggtttttataatccttggccgcgctgaaggtgcgtttttttgtgcgcgcaaaggaaggcggatctagaataatcagatcaaagcgcaaatccttttttgcagcatatgaaaaatagttaaaaacgtccatcactttaatgtcgtgcgcttcgtaatccagcttgttcacgctgaattgctcgatcgttttggcaagacttcgatttgccacgtcgacgcttgttgttttctccgctccgccaagcgccgccgccacggagaatgcacccgtataagaaaacgtatttaaaacggttttcccttttgcatagcggtctctgatcgccttgcgcacatgtctctgatccaaaaagatgcccgtcatggcgccttcattcagatccaccgcgtattgaatgccattctcttggatgatgatcgggaactcgccccttctccctttcacgaagtcatcatcttcaacgtattgtccagccgtgtcgaagcgtttcttctcgtaaatcgctttataatcaagatccatctcatccaatgcggaaatcagcatgtctttaaaggtgtaaattcccttgctgtaccattgaatcagcaggtagccgtcataatagtcgatggtgacgccgccgacaccgtcaccctcaccgttgaacaggcggaaagctgttgtatcttgagcctcaaatagtttggcgcgcgcttgggccgcttttgttaatttgctgagaaaaaatgcttggtcaatctgttcatgtttattgcgggtaagcgtccagccaacccctttgttttgcaggccgtaatagccccgcgcgagaaactcgccgccgctctcagacacgatatcaacgaggtctccttctttcatgtgccccgcactccctgcgagagcttctttttcaataaggggatagcctttttttattttggcagcgtgtgctttttttagggtgagtagcttcatatatgtcgtcctctttccgtttgctttctcttatggtaccacaaaacgccaagatgtctgcattgacagaaaggaaaggtttttctacgatagacaaaaagagttacgaggaggagcagcatggcaaaacgaattgaccatacaggcatcatggtaagagatattaacgcgtccatcacattttatgaagaggtactaggcatgaaattgaaggatcgcatcactcacacgaacggtgtaatcgagcttgcttttcttggctttgaagacggcccggaaacagaaattgaactgattcaaggctacagcagcgagcttcccgctgaaggaaaagtgcaccacattgccctgctgacggatgacatcgcggctgaatatacaaaagcggaaaaaatgaacgcaaaatttatcgacgaggagatcacaacacttccaaacggataccgttatttctatatcgaaggccctgacggtgagtggattgagttctttcagcggtaaaaataaagaacgtacattttgtgatgtacgttcttttttatctataccaactgatatacgttgactcatcgcaaatcatagcttcccagcccatacgctcaaccaattcatggatgtttttatctttggctaaaaagacattaatgaatgagtcatatacactcataaacacaaaatccattttctcatcagttaaaacgagctctgttgcggcttcatcaagaaccgtccgcaagttggcttcagttatgtccaaaacgccgcggttttccacaatcggttctgcgtaataaaaccgattggatccgttcgcacctaatacctttaccaaactcggaatatgaaaatttgaaatatgatcctcactgggataatagaggtctccatttatgttttcatgtaacacctcagccaaatcctctctcgcgaactcgtcccttaaagcgcctatcgacgtcattaaagccagcgccagctcagcatgtgtttgaaagccgcaagaagacataaccttcttccaggaaacagccttgcctattcctcttatttcattatcgtttggataaatatgttcataatcattttttctttttgcattctcccatccttcaggcatttggataaaaggagaaaagataagagcagcagatgagtattcaactggtacttgttgtaagattggtgattcgtcatctaaccatatataatctagcatgcgcacctcctttacatattctaacattcctttcgtttgaaagagatgatcagccctatgacaggctgatcatctatcacatcacatttttatccccagattcaaccgcactctcttcccgccatttttgatgatcccatattctgaaaaacggatagtagatagcacaggtgatcagcagatttaccagctgcataactgcgcccgacacctttccgcctgtcgccaggtaacctgatatgagcggcggcatcgtccatggcaccgcgattccggccggtcttgccaccagcccggtgctcatgccgatataagtcgcggtaatcgtgaggagcggtgcgatgataaatgggacaataaggaggggattcatgacaatcggcatgccgaaaatgatcggctcgttgatattaaatagcgcagggccgattcctaatcgtccaagctgcttcatttgtttgctgcgggagcgcacaagcatcgtcaggacaagcgccagcgtcgccccgcttccgccgacattgatccaaatttgaaaaaactgagtcgtaaaaatactcggcagcgcctcgcctgcttggaaggcgagacggttggcatccatcgcgccgtaccaaatcggcgccatgattccgccaatgatggaagccccgtgaatcccgcacgaccaaagcagcatctgcacaaattcagcgatcaggcttccgccgagactgccgccaaggatggaaagcggtgtgccaagcaggtctcctacgacattgtgcagactctgaaaaggtgtcatttcaatcagaagacgcgccagccatacgagaagcacaatgataaagccgggaatcagcgcgacaaatgatttgcttaccgcaggcggcacaccgtctggcattttgaagacgatatttttttgaataatgtaccgatagatttcggttgaaaacaaggcgatcagcatggcgacaaataagcccttgctgccgagcagcgtgatcgggattccgccccctaccatgatggactccgttgagccatgcggtgtaaacggcacctcaaacggtgttgccagcagaaatgcggcaattgaaatcgctccggcagaaagggcatcgacaccatagctttctgccagccgataggcgatcccaaaagcggcaatcatcgccataatatcaaacgaagcgttaacaggatatccgagcttatcggcccactcgttcccaaacacactcgccatgaaatcagcataccccggaatcggcaagctcgttaaaatcaagaagacagacccgataataatcagcggcatggtcaggataattccgtcacgcaaagcgctgagatgccgctgcccggcaattttcccggcgacaggcattattttttcctccatcacccgagtgaatgtgctcatcttaaaaacccccttttctcattgctttgtgaacaacctccgcaatgttttctttatcttattttgaaaacgcttacaaattcatttggaaaatttcctcttcatgcggaaaaaatctgcattttgctaaacaaccctgcccatgaaaaattttttccttcttactattaatctctctttttttctccgatatatatatcaaacatcatagaaaaaggagatgaatcatgaaaaacatgtcttgcaaacttgttgtatcagtcactctgtttttcagttttctcaccataggccctctcgctcatgcgcaaaacagcagcgagaaagaggttattgtggtttataaaaacaaggccggaaaggaaaccatcctggacagtgatgctgatgttgaacagcagtataagcatcttcccgcggtagcggtcacagcagaccaggagacagtaaaagaattaaagcaggatcctgatattttgtatgtagaaaacaacgtatcatttaccgcagcagacagcacggatttcaaagtgctgtcagacggcactgacacctctgacaactttgagcaatggaaccttgagcccattcaggtgaaacaggcttggaaggcaggactgacaggaaaaaatatcaaaattgccgtcattgacagcgggatctccccccacgatgacctgtcgattgccggcgggtattcagctgtcagttatacctcttcttacaaagatgataacggccacggaacacatgtcgcagggattatcggagccaagcataacggctacggaattgacggcatcgcaccggaagcacaaatatacgcggttaaagcgcttgatcagaacggctcgggggatcttcaaagtcttctccaaggaattgactggtcgatcgcaaacaggatggacatcgtcaatatgagccttggcacgacgtcagacagcaaaatccttcatgacgccgtgaacaaagcatatgaacaaggtgttctgcttgttgccgcaagcggtaacgacggaaacggcaagccagtgaattatccggcggcatacagcagtgtcgttgcggtttcagcaacaaacgaaaagaatcagcttgcctccttttcaacaactggagatgaagttgaattttcagcaccggggacaaacatcacaagcacttacttaaaccagtattatgcaacgggaagcggaacatcccaagcgacaccgcacgccgctgccatgtttgccttgttaaaacagcgtgatcctgccgagacaaacgtccagcttcgcgaggaaatgcggaaaaacatcgttgatcttggtaccgcaggccgcgatcagcaatttggctacggcttaatccagtataaagcacaggcaacagattcagcgtacgcggcagcagagcaagcggtgaaaaaagcggaacaaacaaaagcacaaatcgatatcaacaaagcgcgagaactcatcagccagctgccgaactccgacgccaaaactgccctgcacaaaagactggataaagtacagtcatacagaaatgtaaaagatgcgaaagacaaagtcgcaaaggcagaaaaatataaaacacagcaaaccgttgacacagcacaaactgccatcaacaagctgccaaacggaacagacaaaaagaaccttcaaaaacgcttagaccaagtaaaacgatacatcgcgtcaaagcaagcgaaagacaaagttgcgaaagcggaaaaaagcaaaaagaaaacagatgtggacagcgcacaatcagcaattggcaagctgcctgcaagttcagaaaaaacgtccctgcagaaacgccttaacaaagtgaagagcaccaatttgaagacggcacagcaatccgtatctgcggctgaaaagaaatcaactgatgcaaatgcggcaaaagcacaatcagccgtcaatcagcttcaagcaggcaaggacaaaacggcattgcaaaaacggttagacaaagtgaagaaaaaggtggcggcggctgaagcaaaaaaagtggaaactgcaaaggcaaaagtgaagaaagcggaaaaagacaaaacaaagaaatcaaagacatccgctcagtctgcagtgaatcaattaaaagcatccaatgaaaaaacaaagctgcaaaaacggctgaacgccgtcaaaccgaaaaagtaaccaaaaacctttaagatttgcattccaagtcttaaaggtttttttcattctaagaacaccacacacaacctttttcccatccattgtacaggcttttcatactattgctatacagccatgaacagcataaaatgaacgttattacagttatcaccacatatggcgggattgtgactgggcaggcaggcaagacccaatgatgcaaagggagtattaatgcctaaaaaacagggcattttaactcttcttttcgtgttgggctcataacggcgccttggacaaccccctattctcatgctccgtcgtcgacgcgggcatttttgtcattttcagccggtatttctcacttttttcattttgattgtcaacttttcatttgatacgatgaacaagccgacttttcttcagcaaaggaggttttaattgcttgcataaagagattgcaaaagaattactgctgctcgcaggaggaaaaaacaatattatcagcatcagccattgtacgacccgtcttcgttttgatgtaaaggacgagacgaaaattgatatacatgccattgagaacctgcaaggtgtgcagggcacctttttccgctatgggcttttccagattatcttcggagcaggcgtcgtcaacaaaatatataaagaagtcgttcatgtatgggagaccgcgccttctgaagagcctgtccaccagaaaaaagccagccggaagctgaaccctgccgcagcttttgcgaaaacactgtccgatatttttgtgccgattattccggcaataacagcaagcggcctgctcatggggctgatcggcatgattaaggtgtttcattggttcgctgccggcagcccatggattaaaatgctcgacctcgtgtccagcacagcctttattttactgccgattttagtcggcttcagtgctgcacggcaatttggcagcaacccatacctaggggcagtgattgcagggcttttgacgcatcctgatctgctggacccgtctatgctcggcagcaaaaccccgtcttctttagacatatgggggcttcatatcccaatgatgggctatcagggttccatgataccgattcttctttccgtttttgtcatgagcaaaattgagaagctattaaaatcgattgtgccgaagtcgcttgatgtcgtgatcattccctttattacggtcatggtgacagggtgcctcgcgctgattgtgatgaatcccgccgcgtccatcatcggccagatcatgacacaatcgatcgtctatatttatgatcacgccggcattgctgccggagctcttttcggcggcatctactccaccatcgtcctatctggattgcatcatagcttttatgcaattgaggcaacgctgcttgctaatccgcatgtcggtgtcaactttttagtgccgatatggtcgatggcgaatgtggcccaaggcggagcggggcttgcggtattcctcaaaacgaaacaatcaagcctgaagaaaattgcgctccccgcttctctgaccgcgtttttaggcattgttgagccgattgtattcggggtaaatctcaaattgatccgtccctttatcggagcagccatcggcggtgctattggcggagcatacgtggttgcggtacaagttgtggcaaattcctacggactgacaggcattccgatgatttcaatcgtgctgccgtttggcgccgctaattttgttcattatatgatcggtttcttgatcgcagccgtctctgcttttatagctacattgtttctcgggtttaaagaagagacagaataactggatttattcgatttcattcataaaacgggggatgaaaggacaaaaaagctatgaaaattaaaagaatcttaaatcataatgctatcgtcgtaaaggatcaaaatgaagagaagattctcttgggtgcaggaattgcgtttaacaaaaagaagaatgatattgtcgatccgtcaaaaatagaaaaaacctttatcagaaaagatacacctgactataagcagttcgaagagattttagaaacattgcctgaagaccacattcagatttctgagcaaattatctctcatgccgaaaaagagctgaacatcaaaatcaacgagcgcattcatgtcgctttttcagaccatctttcttttgcaattgaacgcctgagcaatgggatggttatcaaaaatccgctgctgaatgaaatcaaagtcctttatccaaaggagttccagatcggcttatgggccagagcactgattaaagataaactggggattcacattcctgatgatgaaatcggcaatatcgccatgcatatccacacagcaagaaacaatgccggcgatatgacacaaacgcttgatattacaacaatgatccgtgatattatcgagattatcgaaattcaactgtctattaatatcgttgaagataccatctcttatgaaaggctcgtgacccatctccgctttgccattcagcatatcaaagcaggcgaatccatttacgagctggacgcagaaatgattgacatcattaaagagaagtttaaggatgccttcctgtgtgccctaagcatcggcacctttgtgaagaaggaatacggctttgagtttcctgaaaaagaattgtgctacatcgccatgcatattcagcggttctaccaacggtcagtcgcacgctgagacaaacaaaaaacgcttttgatcatctcaaaagcgtttttttatctgatttattggttgatcgccggattcccaatcgtattccacttcgtataggacatgtaatggaaatactcatcgcgatacggatgttttgtattggagttccaaggcttttctccgccgcagaagtgcacgattgccgggttttctcttgtttcattatattgcttccgccctaacagagtcgatggggttttcagctttaacatgatataggtttgagcgttccagcgcggatgaagttcataccactgatcatacaagatcgcattcagtgcatcttggtcatgcagcacaagaaagtcttcgtctgggtgttcattgataaagttgatgactttttctgtgatgttttgctttctccaagactcaaaatcaataatcatgatacctgagttaaaatacttccctgtatcagtgacgttcatttctttcaggcgttcatgctgccccgcatcctcaacagcggctacggtgtatggcgcaatgtctaagtcccatagcttagaaatatcctctaggacaagcgcatcacaatcgatgtaaatcattcgtttgatgctttcatccttaattaagtcgggaatcgaaatgcggtaatacgcggcttttgtaatatggctgctctcaaccgcatgttcatacatgttggtatccacttctaaaaactcaatcggcactccgaatttcaaagtggtttcttccagtctttttttgttatcaggcttaattccgccatcaatgacgtataattttacctctctctcctgatccatgttagtcaataaagaaacgaacatcccacctaaatgacgagcataattatcatctgcgcatgatacgatatgcatgatttcatctttcctcaatggtattcatctccctttttgttgtacaagttacataccctttttcaaaaaaataaacacgttctccgacatttttttaaacagaatgtgtgatacaacaaaaaaggtgtcattttttgaagatgcgataaagccaataaagaatgaaaaagcttgcgattgtgatggcttcagccgagacgatataccacggccatggcccgagaacatctaagagagaggaaccgcccggttttttcgtcaaatacatataattcgcgccaagccagcgatcaatcagaaaaatacagacgccgtacacattaacaagcaggactgtcacccataacgagcgctggcccattctgtaggtgccaatcacagccatcagcagacaggataaaaacacagacccgtgagaaataaaaaagaggatatatcggatatgcggaaatgaaaacataccgaggtcaggagtggcaagagcctgaatcgaactgccgatgccgacaaaaaacaaaaacacaaacagctttctgctttttgtcactaacataatagctgacaaatacaccgacaggtcactaagctggagaggcaatgaagtgcgcaccgaccacctgtccgtggcgaccatccatatttgatagccgatttgcgaaccaagcaaaagaaacacaaacagagaacgcaaaaaccggctggccctcggctgcttgacctcatcttggaacaaaaacaacagaatggccaaaagggagataatcgctaacgtcactacatgctctgtcgaaaacagatgaaacggatcatgcttatagtcggattgaacatatttttgcaaaactgcacccccgttttcgggtttttgtttattttggcgttgtttgggctttttttattcaaccgatatatgggcttgaagttcacaccagactctgttaaaattcgtttcatagctaatgattctgataatttaaggcaggcctaaaaaatggaacgttcacatcaacatcagcagcttcggaaggaagaacacgatacactttctaagctcaaacaaatgcccgtcgagtcactcaacctggaagccatttcgatcgctacgaatctgtatcggtctgcacaaaggctccgtgtcaaaatggagactgaggttctttctacctataacctttcttggaccgctttctccattctttatgatctatgggtatggggagcgctcgaaacgagaaaaatcgctgagctgtcagggatatctacagctacagcaagcaacgtgatcaaaacgctcgaaaaaaagagtttttgccgtaaaagcatcgacacaagagatcggcgactcgtgtttgtctcaatcaccgattccggcaaacaagcgatcgaagaactctacccggagtttcacaaaggggaaacagagctcattgcgggaatgacgaaggacgaacagaaaatattgacagggctgcttagaaaggtagctgacaatcttcatacaacataagctttgacgggaatccagtagcggtttgtctccctgtttcagagagccggcggtaggtgcgagccggcgcacaggcaaacgtgaattacctccccaagctttctttgtgaaccttagtagcaaagaacgggaaaccgttattcgaatgagcggaagacaatgtcttcaaccagggtggtaccgcgtgcattgagccacgtcccttattgggatgggctcttttttgtgtttgtaaaaaaggaggaaaaatgatgagaacatttgagcagctcacagcgtcacaacaaaaagaggtagaaagacagcttcagctatacatgacaggcgcccacgaagtcataccgccggaggaattaaaggcaaagctcgtgaaatcaatttccacgggcacgccgcttaaaattaagctcggattagatccgtctgcaccggatgtacatttgggccatacggttgtgttaaataagcttcgccaatttcaagaaaacggccacattgtccagctgttaattggggatttcacaggaaaaattggtgatccgaccggaaaatcggcagccagaaagcaactgactgatgaagaagttcagcacaatgccaaaacctactttgagcaattcggaaaagtgcttgatccagaaaaagtcgagcttcactataactcaaaatggctgaaaacattgaatctagaagatgtcattgaattagcagggaaaataacggtagcccgcctgatggagcgcgacgactttgaagaacgcatcgccatgcaaaaaccaatctcactgcatgaattcttttacccattgatgcagggctatgattctgtcgttctcgaaagtgatattgaattaggcggaacggatcagcatttcaatgtcctcatgggacggcatttccaagaacgatacaacaaagaaaaacaagtcgtcatccttatgccgctcttggaaggcttggatggcgtcgagaaaatgtcgaagtcgaaacacaactacattggcattaacgaacatccaaacgacatgtacggaaaaacgatgtcactgcccgacagcctgatgaaaaagtacatccacttggcgacagacttagagcttgaagagaaaaaacagctcgtaaaagacttagaaaccggcgccgttcatccgcgtgatgccaaaatgcttttagccagaacaatcgtccgaatgtatcacggagagaaagcagcagaagctgccgaacactcgtttaaaacagtctttcaggaaaacagcctgccggaagatataccggccgtaaactggaaaggcgaaaaaacgatagcgatgattgatctgctcgtcaagctaaagctcctctcttcgaagagcgaggcgcgccgcatgattcaaaacggaggtgtacgcatcgacggagagaaagtaacagatgttcacgccaaagcagagataagagagaatatgatcatccaagtcggcaaacgcaagtttttaaagctccaataatctgatattccgaaacgcttatgacccttcattcataagcgtttttttgcaggtataaagcactgtcttttcaaaaacgctctccatcttgcaggaaactcctttagcatcccgaaatattccccaaccatacatttaggggaggtttatttttgatgaaaaagcttttgactgtcatgacgatggctgttttaactgccggcacactgctcttgccggcacagagtgtcacccctgccgcgcacgctgtacaaatatcaaatagcgagcgcgagcttccattcaaagcaaaacatgcgtactctaccatttctcagctaagtgaagcaatcggccccagaatagccggaactgcagctgaaaaaaagagtgccctattgatcgcctcatcaatgagaaaattaaagcttgatgtgaaggttcaacgattcaacattcctgaccggcttgagggtacactgtcttcagcaggacgcgatattcttctccaagcggcgtcgggctcagctccgactgaggaacaagggctgacggccccgctttacaatgcgggattgggctatcaaaaggactttaccgctgacgccaagggcaaaatcgccttgatttccagaggagacctgacttattacgagaaagccaaaaatgccgaagccgccggagcgaaagctgtcatcatttataacaacaaagaaagcctcgtgcctatgacgccaaacctgtcgggaaataaagtcggcattccggtcgtcggcattaagaaagaagacggcgaagcacttacccagcaaaaagaagccaccttaaaactaaaagcattcacaaaccaaacctcccagaatatcatcggaatcaaaaaaccaaagaacatcaaacatccagacattgtgtacgtgaccgcccattacgacagtgttcctttttcgcccggagcaaatgacaacggctcaggtacctctgttatgctggagatggcgcgtgtcttaaaaagcgttccatctgataaagaaatccgctttatcgctttcggcgccgaagagctcggcctgctcggctcctctcactatgtagatcatctatcggaaaaagagctgaaacgaagcgaagtgaacttcaacttagatatggtaggcacaagctgggaaaaagcgtctgagctgtatgtcaacacattggatggccaatctaactatgtttgggaatccagccgtacggctgctgaaaaaattgggtttgacagcctgtctctgacacagggaggatcatctgatcatgtgccattccacgaagccggcattgattccgctaactttatttggggagacccggaaacagaagaagttgagccgtggtatcatacccctgaagactcgatcgaacatatcagcaaagaacgcctccagcaagcaggcgatcttgtgacagccgctgtctatgaggctgtgaaaaaagagaagaaaccgaaaaccattaagaaacaaatgaaggcgaaagcatctgacatttttgaagatatcaaataaaaaaagacggcacttgggtgccgtcttttttaatccacttctttcttaatccccagcattttctcatctaggtaatgggcaatctccgcggcttctttcagctcatctgttaattgcttaggaacgtcattgttcaatttataataaattttatgttcaaggctcgcccagaaatccatcgcgattgtccggatttgaatttctgctttgacgtattccacacggttcgttaaattcacaggcatctcaatgattaaatgcaggcttcgatagccattcggtttgggtgtctggatataatcctttacctttacgattctcaaatcttcatgctgcttcaacacattcacgacattataaatgtcagaaataaaggaacagatgatgcgcacgccggcaatgtcgtgaatatgctccttcatttccttcgtcgtaatctcacagccctttctcattaacttattcacgatgctttcaaagctttttacacgggattttgtatgttcaatcgggttgtgtccgtgaatgaggttatattcctggctgataattgagaactttgtatcgagcgcatctagcgcaaatttataaactaataactcatttttccaatcttccattactgtttttaaatcgtccatatgtgttacagataaatccatgttcgtcatctcctttaacggaactttatccgctgtccatgtactagacgtccctgtctgctgcaaggttctatgaatttttttacaaaatgcggtcgattgtaacaaaaaaagaccgcatgaaacgagcggtcttttttattatcggaaatagctgatcaataatccgatcgagagcaggaatccgaaaaatgtatttgtttgggctgttgatttcattgcgacaatcatattcatcggcatttcgttctggacgaagcccttcactgcctgaaccggcttaggcacgctcaaaaagacgacaaacagccatgggcttgcggcaccggtaataaccaagccgacaacccagatataagcgacggcaaacgacgcagctaacagagtaacagctcccttatgccccatcaaaatcgccaatgttttgcgtccgccttttttgtcctcttcaatatcacgaatgttgttcgacaggttaatcgcgccgacaagaatcgcaatcgggatggaaatcaaaatgctctgcatattgatcttatctgtctgaatgaaaaacgaaatcagcacaaacaccgaacccatgcaaatgcctgagaataattcaccgaacggcgtgtacgcaatcggcagcggcccgcctgtatacaggtagccgatcgccatgccgacaaggccgatcagcgcaagccaccagctgctgctggcacaaatatagacaccgagcaaaatggcaatcccgtatgaggcaagagctaattgcaaaatcgttttaggcttcattccgtggcgtacaatggcccctccgattccgactgattctgctgtatctaatccgcgtttaaaatcatagtattcattaaataagttcgtcgcgatctggatccataggcaagaaaacagcatagccaaaaacagcagcagatcaaccttcacataaaacatcgccaaaacggttccgagcagcacaggcacaaacgatgcggttaacgtatgaggacgggttaactgccaaaggatctgccccatgctttctttttgcggcgctgtctgaccctcacccttatttgtttggttcatcttcctcttcctttctattaaaaggcttactttttttcagccggcagcttaataaaaaactccttttgcttccttatctatcataatgacttctcccttatttcacaagataccgcaagaaggcgttttctttcttattatacgcttctcgccctgatttcattaggtttctgctttcacttgaacgaacaggtacagaaaaatttttttaagtacattacactttttaaaagttaaaaagatcttttgactccaggtatcttttcctttattatgaatcagctcgaaacattccattcttgcccttgcaggtataaagattcattttcaaaaacatacgccgatatattaatttgagggagattagggaaaaaatgaaactttttgagcatctgatcgtcaaataatcatgtgattgtcgaaaaaacgggaagggaatttttgatatgctgcaattaatgaaacagctgtatgaaaaacccgctgtcaagtggacatgtcatacaggcttttatttgatgatactgcttgttttgttttttatgtatggttttcacaccgcgaataccggttcatatatttataacgatttctaattggagagagaataactatgaaacttttacatgctattcaaacacatgcggaaacttatccgcaaaccgatgccttccgctctcaaggccagtcgctcacgtatcaggaattatgggagcagtctgaccgcgcggctgccgcgatccaaaaacgcatttctggggaaaagaaatctcctatccttgtgtacggccacatggagccgcacatgatcgtttccttcttgggaagtgtcaaagcgggacatccttatattccggttgacctgtctattccgtccgaacggattgcgaaaattatcgaaagctctggagcagaattgctgatccatgcagcaggactctcaattgatgcagtcggccagcagattcagacagtttctgcggaagaactgctggaaaacgaaggcggctctgtcagccaagatcaatgggtcaaagaacacgaaacgttttatatcatttacacttccgggagcacaggaaatccgaaaggcgtgcagatttccgctgcgaaccttcaaagcttcacagactggatttgtgcagactttccagtcagcggaggaaaaatatttttaaaccaagcgccgttctcatttgatttgtctgtcatggacctatatccgtgccttcaatcaggcgggactttacattgcgtgacaaaggatgctgtgaataagccgaaagtcttatttgaagagctgaagaagtccgggctgaatgtgtggacatcaacaccttcctttgtgcaaatgtgcctgatggatccgggtttttcacaggatctgctgcctcatgcggacacatttatgttttgcggagaggttcttccggtttctgtggccaaagcgctgcttgagcgttttccgaaagcgaagatttttaatacgtacggcccgactgaagcgacagtggctgtcacatcggttgaaattacgaatgacgtcatcagccgcagcgaatcgcttccagtgggcttcgccaaaccagatatgaacattttcattatggatgaagagggacagccgcttcctgagggagaaaaaggagaaatcgtcattgcagggccgagtgtaagccgaggctaccttggtgagccagagctgacggaaaaagcgtttttctctcatgaaggccagtgggcataccgaactggcgatgccggctttattcaagacggtcagattttctgccaaggacgtttggattttcagattaaacttcacggctatcgaatggagctggaggaaatcgagttccatgtcagacagtcacagtacgttcgttctgctgtcgtgattccttatcagccaaacggaacagttgagtatctgatcgctgctattgtgcctgaggagcatgagttcgagaaggaattccagctgacaagcgctattaaaaaagagcttgccgcttctcttccggcatatatgatcccgagaaaatttatctatcaggatcacattcaaatgacggctaacggcaaaattgaccgaaaacgcattggcgaagaggttcttgtatgacgccttacagctcgtttttattctttatactgcttggcattcttcttctgccgacgatcattctcggcttaaacggaaaaagatttcaagcatacaacatgttcatatctatcattatattggctttaattttttcgcacgacttacacggggtcatcgcgctgtgcctgtttacaatatggcaggtgctcctgatcagcggctatctggcataccggcagaaagcgaacagcggctttgtcttttgcggagctgttatcgcgtctattctgcctttatttctgtcaaaaatatggccgtttctttcacacccgcagccgcatcatccgccgcataacctgatcagctttttagggatttcatatttaacctttaaaggcgttcagctgattatggaagcaagagacggactgctgaaagaacagctgccattgcaccgtctgctgtatttcatcctgtttttcccgacgatttcctccggcccgatcgacagataccgccggttcgtcaaggatgaacagaaggcttggacgaaagaagaatacgccgacctgctgtatacgggaatccataaaatcttcatcggtttcctgtataaatttattatcggctacgcgatcaatacgtacttcatcatgaatcttcccgcaatcacgcacaataagattcttgggaacctgctgtacatgtacggctacagcatgtatttattctttgatttcgccggctacacgatgtttgccgtcggggtcagctacattatgggcattaaatcaccagaaaactttaataaaccgtttatcagtaaaaatattaaagatttctggaatcgctggcatatgtctctgtcattttggttcagagattatgtgtttatgagattcgtattttggatgactaagaaaaagtggatcaaaaaccgtatggccgtctcaaacatcgggtatttcctgctgtttatgctgatgggggtttggcacgggctcgcgccgcaatatatcatttacggcctctatcacgccgttctgatgacgtgttacaactttttcgagaagtggaataagaaatataaatggctgccgtccaaccgctggacaaccattctcgctattgtgatcacattccatttcgtttgcttcgggttttatattttctcaggaaaaccatttcatcaccaccattaaaggagattagaaagctatggattttaaacaagaggtattagacgttttagcagaggtttgccaggatgacatcgtaaaggaaaatcctgatattgaaatttttgaagaaggtttgcttgattcttttggaacagtagaattgctgcttgcgattgaaaaccgttttgatattttagtgccgatcactgaatttgaccgggacgtttggaatacacctaacaacattgtaaatcagctgtctgagttgaaataatgaaaaagcgttttttcggtccaattattttggcgtttattctattcgcaggcgccatcgcaattccatcttcatggctgacaggcttcatcaccgataagcgtgtgaaagagtcagcaacagccttgaatccgagtatgtttcaagggctatatttacaagatcagatgctcaaagatccgacatatcttccgatttacgggtcttctgagctttctcggctggacgagttccacccatctaattattttcaggtaaacaatgagggattcacgccataccttgtcggcaaaggcggatcccagtcattgattcattctttaaacttcgctgcccacatggatcagctgaagggcaaaaaaatcgtattcatcgtgtctccgcaatggtttattaagcgcgggtctgatgaacagcatttcgcgccgaactattctgcgctgcaagggcttgatttggcatttaacgatcagatcgatcctgaaattaaaaagaaaatgatgaaacgcatgcttcgctttaaggctgtgcaaaacgatgccattctttctgagctgtacaaagcaatggtaaacggtcagacgtggaaagtgaacgcgctgaagccggcggcgaaagtgtattacagcatgctggaaaagaaagatctgtattattcaacgacagaatcatccgggccaaagcgctatatctcgcagtcagtaaaggataagtcatggtctgaattgaataaactagcggatcaatcgggcaaacgccactccggttctaacgattttcacatcgacaaccctgtctataaaaagctgaagccgaaagtgcctaagctgaaagggaaaaacaaaggaagatcgtatgcggtgtcaccggaatatggcgactttgaaatgatgctcgatatcctgaaggatgcgggcgcagagcctatgtttgtcaccattcctgttaacgggaaatggtacgattacacgggcttcccgaaaaaaggacgcactgactattacaaaaaggtaaataaacaaatcagagcgaagggcttccaggttgctgatttctcagggcatgaatatgacccgtatttcatgaaagacaccattcacatcggctggaaaggctgggtgtatgtcgataaagcaattgacgaattttataaaaccggaaaagtcacttcatcctgagcatctcataggacgcggctgcatatttcctgctaagatttgtaatagtaaaggaatcacagccaacttaattaagaggtgttacatccaatgaagatgacaaataatacggttttaatcacagggggttctgctggcatcgggcttgaactggccaagcgcctgctggaacttggcaatgaagttatcatttgcggacgcagcgaagcacgtcttgcagaagcgaagcagcagctcccaaacatccatacaaagcaatgtgatgttgcagaccgttcgcagcgggaagcattgtatgaatgggctttaaaggaatatccgaacttgaatgttctcgtcaacaacgccggcattcaaaaggaaattgactttaaaaaagggacagaggagctttttgtggacggtgatgaaattgaacttaatttccaagcgcctgtccatttatccgcccttttcacacctcatttgatgaagcagcccgaggcggcaatcgttcaggtcacatccgggcttgcgtttaacccgttagctgtttatccggtgtactgcgcaacaaaagcggcacttcactcgttctcgcttacgctcagacaccagctccgcgacacgagcgtggaagtgattgaaatggcaccgcctatggtggacacgggcttaaaccaaaaatcacgcgataaacaaggcctgacgtaccggggcatttcatctgaagaatatgttcaatatttcttggacggcttgaaggaaggcaaacaggagattacaaatgaacgtgttgaaggtcttcgggatgccactcgcgccgattatgacaggttattcgagcaaatgaacacgcaggagaattaatttctcctgcttttttcatatgaatttcttacaaatttgagcaaacctattgcgattatttgttgaaggtatacaatagaatataattattttcaaataagtttgataatataaacaatttaacagcagggagattgaccatgactaaacaaacaattcgcgttgaattgacatcaacaaaaaaaccgaaaccagacccaaatcagctttcgttcggaagagtgtttacagaccacatgtttgtaatggactatgccgcagataaaggttggtacgatccaagaatcattccttatcaacccttatcaatggatccggctgcaatggtctatcactacggccaaaccgtgtttgaagggttaaaggcttacgtgtcagaggatgaccatgttctgcttttcagaccggaaaaaaatatggaacgcctgaatcaatcaaacgaccgcctctgcatcccgcaaattgatgaagaacaggttcttgaaggcttaaagcagcttgtcgcaattgataaagactggattccaaatgcggagggcacgtccctttacatccgtccgttcatcatcgcaaccgagcctttccttggtgttgcggcatctcatacgtataagctcttgatcattctttctccggtcggctcttattacaaagaaggcattaagccggtcaaaatcgctgttgaaagtgaatttgtccgtgcggtaaaaggcggaacaggaaatgccaaaaccgcaggaaactatgcttcaagcttaaaagcgcagcaggtagccgaagagaaaggattttctcaagtactctggctggacggcattgagaagaaatacatcgaagaagtcggaagcatgaacatcttcttcaaaatcaacggtgaaatcgtaacaccgatgctgaacgggagcatcctggaaggcattacgcgcaattcagtcatcgccttgcttaagcattggggccttcaagtttcagaacgaaaaattgcgatcgatgaggtcatccaagcccataaagacggcatcctggaagaagccttcggaacaggtacagcagctgttatttccccagtcggcgagctgatctggcaggatgaaacactttcgatcaacaacggtgaaacaggagaaatcgcaaaaaaactatatgacacgattacaggcattcaaaaaggcgctgtcgcagacgaattcggatggacgaccgaagtcgcagcgctgactgaaagcaagtaagaaaaaagccggcccattacaggccggctttttttacgcttcaattttgttgaaaaactgcggcagatacgctttgtgcgcctctagcatttcgtctaaaatctgtttggccacagtatcggacgggacaagcgggttaatcgtcatggcaaggagcgcagtttgatagtcacctgtaactgccgcttctgccgcgacacgttcaaaggatttgatttgctggacaaggccgcggacagacaccggcaagtcgccgacagcaattggcttagggccggttttcgtcatcacacagttcacttcaactgcggaatcgtctggaatactcgctattgcaccattattgatcgtgttcaccggctgaatgtcatgtttatcattataaatggagctgattaagttacatgctgcatcactgtagtaagctccgccccgtttttccagctgcggcggtttgatcgcaaggtttggatctttataaagctcgaacagctctttttcgaccttctgtacgacttcagcgcgggtgccctccgtttgtgatgcttccagttcgtgctccagcatctcttttgttttaaaatagtaacggtgatagccgcaagggatgacattgagcgcttttaagaaatccggttcccattcggcgcctgagatatttttcatcgtcatcgcgtttttcgggtcgcccatcgcctcgatgacttgctccttcacacttacgccgtccaagaaaacatccagcccgaataccatatggttcagtccggcaaattggacttctacgcggtccacatctacatcaagcgctttggctacgcccattttgatgccgattggaacattgcaaagaccgacgactttcttcaggttggagtagcgaagcaaggcttctgttaccatgccggcagggtttgtgaagttaacaagccaagcgttcgggcaaagctcttctatgtcctttgcgatctcaaggatgaccggaattgtgcgcaatcctttaaacagacctcccgggccgtttgtttcctggcctatcactccgtattttagcggaatgcgctcatcctttgctcttgcctgcaaaagtccgacgcggaattgggtcgtgacaaagtctgcgtctttcagcgcctttctccggtcgagcgtaagatgaatgtcaatcgggacgccagctttttcaaccatccgtttggcgagtgtgccgacaatattcagcttttcttcgccctcggggatatcgacaagccataattcacggacaggcagctcatcataccgtttaatgaacccctccactagctcgggcgtatagcttgaacctccgccaatcgttacaatcttcaatccttttgtcatatgcttgctcccctttgctcggtgattttttcatataactcaatgatctctgcagccatatccttcactgtcattgcattcattaaatgatcctgtgcatgaaccatcagaagcgtcatttccgtcttttctccgcccgcttcattttggatcagctctgtctgataatgatgggcttttgacaattcttcagcagcgtcttgaagctttttccgcgcttcttctgcgtcaccgcttttcgcagcggcaatggcctccattgcggagctcctaccgtttcctccgtgaaggatgatttgaaaaatgatttgttccatttcctcattcacgcgattcacttcctttctctacagagccgcttctttgtcatctgttgctgcaggcgtttggaccagctccagatcgttttcttctttcagcttctgcttatcccacattctgaagaatggatagtagacaacaaaggacacggcaatattaatggcttgcatgaccgcgcctgagacttttcctcctgtcgccaagtagcctgaaaagatcggcggcatggtccacggcactgcgatacccgccggtttggcgacaaggccggtgctcattccgatgtacgtgagtgtcactgtgacaagcggcgtgatgataaacggaagtaagagcattgggttcatgacgatcggcattccgaatataatcggttcgttaatattgaagatggccgggccgaccgcaagcttcccgagctgcttcatttgtttgcttcgggcgcgcaggaacatcgtgacaaccagtgccaatgtggcgccgcttccgccaatattgacccagatatcgaaaaattgctgggtgaaaatcttaggaagctcctcaccggcttggaatgcgatccggttggcatccattgcgccgtaccaaatcggtgccatgacgccgccaacaatgtttgcaccgtgaaggccgcaggcccataaaagcattttgacggcttcggcgacaaggcttcctccaaggcttcctcccagaatggaaagcggagtccccaataaaacgcttacaatattatgaaggctttcaaacggtgtcgcttcaacaatcagccgggctgcccaaattaggaagatgacggcaaagccggggattaacgcgacaaatgacttgcttaccgccggcgggacaccgtccggcattttgaagactaaattgcgctggataataaggcggtaaatctctgtggacaccattgcgataatcatggcgacaaataagcctttgcttcccatgagcgaaagcggaatcccgccgccaaccatgatttctttcgtcgcgccatccggcataaacggcacttgataaggtgttgctaataaaaatgccgcaagggaaatggctccggccgacaaggcatcaacaccgtatttctcggcgagccggtaggcaatgccgaacgcggcgacaagacccataatttcaaaggtcgcgtcgactgggtaggccagtttttcagaccaggagctgccaaacgtttttgccataaactcagcgtatcccgggatcgggaggttgccaatgatgaggaaaaaggaaccgatgataatcaggggcatcgtgaggatgataccatcacgcagcgcctgcaaatgacgctgtcccgcaattcttcccgctataggcatgaccttttcttctaagatctgattgactttattcacatagcccgcccctctctatgacacatgtccaagctgttcagctgatttcagcacttccgccccattgcacgttccataatggacggtattaatgacgtctaccggaaccccctttgactctcctaattttttgagctgcggaagcatgtaacggacttgcggaccgagaagcaatacatccgctttatcgatatgattttgtacagaatcgcctgaaactgcccaaatggtatagtcttttccctgttcctgcgcacttttttccatcttgctcaccagtaagctagtagacatgcctgctgcacaaacgagtaatatattcatgtaaaagaccccctagagtttgatcaattttgtaatgtcctgctgttgctatcatcatattatgaaatcgctttcataaacactcagggtttttccgcaggcaacggaaaaaaggtatatacaggctgtcagctcagcattttttggtcaaacacatccgaaagctcttgatatgaacggcatttgatcagctggttcatcgccgccgggtcatccaaaatgctgccaagcagtttatacatgctttgtaaatccgctttgttctccttttcgacacaaagcagacagacaaattgaactcgctgactctcccaatcgatcggttttttgagcgtacaaacggcccaaaacgttgttttcgtctgcggaacaagcgggtgcgggatggcaacaagattgccaaaacacgttggcgacatgtcttctctttcaaaaatggaatctatgatttcttcatcggcaaagccgcattcgaccactttctgccctaaaaattgaatcacttcttcttttgagcgcagatcctcctgaaaaaaaacgagttctttttttaggtagcgattggctttttccttttcatcactcagaatagattctatttttgtaaagtcagttccgcctaagatggtgttaaccttcagtactggtacagggagctcttttttaatcggaatggtgctgatgacaaaatcaattgattcgtaggacatttgatcaagactataatactcagccgttccaagaatatcgagccgcttgccgaaatgggaacgcagtttttcgcgcagaagctgggcgcttccggctcccgatgcgcatacaatgatacagcgtttcggcgggctttctgttttttttcgttcaatcgcggcgccaaagtggagagccaaatatccaatttcgttttcatgaatctcaatacccgtttgttcctttatcacgattccggcaatgatcccggcttcaaaagcgagtggataatgttccttgatcgctgccagcatcggatttcgaagattcatgccgtatcggttgcggctgatcgccggcttcatatgcagtgccaagccgattttcagctctttgtcatgcaggatgccaagcttcagttcacgatcaacagctttgatcatggcaagtgtcagctgatcggtttcctcttctattgaaaatgtgtcctctccgcattgtgattgtgtcattcgttttgtgccaaggagatgcatggtgatgtaggccgtctcgtctttcggaaacgtaacggaaagctttgattccagctcttttacgatggcttctgcagcctggtactccttttgatgcaggatatgatccatatctttcgggaaaagagaaacatagttttccgttctgatccgtttacaggcgatagcgatatggataatgaggttattcagtcccatgttggacagagggatgcggtcgtttttcatttttttcaagatggcggaacggatgatctcaatttcttcttttggcaaaatatcagccttttcatttaaaacatctatctccgtttctctttcatcaacaatgtactccgccatgcagtacctcatctgcacctcgtccccgcgcagcttgaagccgtaattcggacgtgtttccatgacgatgcggtaaggcagcagacgtttctttacttcctttaaatccgtttggagtgtagattttgagataaatagttcttcagcaagttcatcgagcttgagataatggtccgccagcagcagacgtttcataagataggccattctctcctccggcaataccggcaggccctttttttgctgaaattcatcttgcagcagtgttctgaatacttgctcgtcatcaatgcggagcttgtagccggagcctcttacagattgtacaaaggcaccgtggccgcttagcacaccttgaagttcctttatatcattgcggactgtccgcgtcgttacgtttaattgcgcggcaaaaaacgaacttgtcaccggggcttcagccgccatcagcaagcgcagaatatcacgtagtcgcccatgaagcatgagaaaaacctcctaactagtagatgcagggattcagtgaataggcagaaaggatgatgaagggatgcgaaatgtatataaattctataatggagagaatggcaagtcaatgaacatccggaggactagagggaaaactgacctataaaaaaacagccgggatcagccggctgttctagatgcggacatattcttttgtttagacgccttgcggtccttcatgatttttcgaacaatcgggtaaatgaccggcgcccatttgataacggttttgatcatctttttcaaagctccgattctcccttcttttttctcaaccattcccctgattgcctcttccttaaacatgctaacgcgacacgtacctgtttcccgtcacccagaaacgccatggataatcgcgtgcctccccgctgttgtcaatgccgatgcgcgggccggttgaaattgcttccggtgtgtacccgctttcgatgtaaagcggctgttccgtgatccagcgtccgtagtcattcatcgtgacgccaagcgctttcgtcagctttcctggtccgtttgtccattccctcggactcctgcccggccttctctcctccattaacagctggccttcatgcggctcaatcgccctgattaatactgcttgcgggacatcctcttccgccgcaacgacattcagcaatgtatgggtgtgcatcacgtatgtatatacccgcccagcttctgcaaacatgatctcagtccgcttcgtccggcggttgttaaagctgtgggccgctctgtctccagcccccatataggcctctgtttccacaatatagcctgacgctgtgccttcgtctgtttcttttacaagaaggcagcccagaagcgatggggcaagctcaagagcggttttttgataaaacgtgatgggcagcggatttttttctctcgtcacgaatcgacctctccttttaccgatttttgtacattgtaccattcccgaagcagatcaaaaaaaacggctgttttaaaatctttccattcagggaatattgttaccgttcaaaaaaggagggccaaccattgaaagatgatcatcaaaacaagcagcaccaatcaaatgcccaagggagcgaggaagcgttttctcataagacatccgggaaaaacgagtcagaggataccttaacgaataggcaggggcatcctgttactgacaaccagaatgtgagaaccgtcgggaatagagggcctacaacacttgagaactatgattttctcgaaaagatcagccacttcgaccgggaacgcatcccagagcgggttgttcatgccaggggagcaggtgcacatggatattttgaagcgtacggaagcttcggagacgaaccgatttcaacatacacaagggccaagctctttcaggaaaaaggcaagaaaacaccggcatttgtccgtttttcaactgtgaatcatggaaaacactcgcctgaaacattgagagacccgcgcggttttgctgtaaagctatatacagaagacggaaactgggatttggtcggaaacaacctgaaaatcttttttatccgcgacccgctgaaatttccggatcttgtacacgcatttcagcctgatccagtgacaaacatccaggatggtgaacgtatcttcgatttcatttctcaatctcctgaagcgacacacatgatcaccttcttgttttcgccttggggcattccggccaactaccggcaaatgcagggttcaggcgtacatgcctataaatgggtgaatgaggagggcaaggccgttctcgtgaaataccattttgaaccgaagcagggcatccgcaacctgacacagaaggaagcagaagagattcaagggaaaaactttaaccatgccacacaggatctatatgacgcgattgaaaatggcgattatccagagtgggaagtatatgctcaaatcatgagcgatgatgagcatcctgaactggactttgatcctcttgatccaacaaaactgtggtataaagacgatttcccatggaaaccgatcggcaaattggttctgaacaaaaatccggaaaactaccatgcggaagtggagcaagcttcatttggaacgggagtgcttgtcgacgggcttgatttttcagacgacaaattgctccaggggcgtacgtttgcctactctgatacgcagcgctaccgtgtaggcgcaaattacctgcagcttccgatcaactcgccgaaaaagcatgtcgccaccaaccaggaaggcgggcaaatgcaatatcgggtcgatagagcagaaggacaaaacccgcacgtcaactacgagccatccattatgggcgggctgaaggaagcgaagcaagacggaaaagaccatacgccgcatgtcgaaggtgatgtaaagcgtgaagcgattgacagaacaaacaacttcggacaggctggagaaacgtaccggagatttactgaatttgagcggaacgaattgattacgaatttggtgaatacgctttctacgtgccgaaaagaaattcaggatcaaatgattgagaatttcacaaaagctgatcctgactacggaaaacgcgtagcagaagggctaaaaaaggtctccgaaaacaacagcaacgggccgatcggcacaactgaaacggaacaggctgcaaagcaggctgaacaggagagtcatccgtctgatccgtattaacaacagcgaacagggcttttttagaagccctgtttttttatttttctattgaaacgctttcaataattgtgttgtacttggaaggaaaggggtggagagatacgatggaattacagcaggacttgattcctcagaaaaaaacaatcggcgctttagatcacgccgtttttttatgcatggtattttgtttctggttttcaggctatatttacgttcctgtattcagtctgtatttggaggatctgcacttttcatatggcgcaatcggcatcattctcggcagctacggggtcacgcaaatccttctgcgattcccgctcggccttttgtcagacatcctgttttccttgcgcaagcaattgttaattgccgggttcggcttttccgtcctcagcagcctgctttttctgatgtttgattctttcttcttcgtgctggccgcccggcttttcgcgggaatcactgcttctacgtgggtgatggcgaccattttatacgcacattatttcaacaatggcaatgcatcaaaagcaatgggcatcatgcagttttttaccgtcatgcctcagtttgccagcattgtgttctgcgggctcgccgcagcccatttagggaggcaggttcctttttggatggcgctggcagcttctgccgcaggtctggtgatctgctgctttattcaggatccgtctgctcctcccgcaaaccgtggcaccattcgtgtcaatcagtacatcaaagatacattgcggctgccaaagctgaagcttttcaccatcctgtctatgacggcccatgccgtattatttatcacagtgtttggttttacgccgctttacatgaatcagctcggaatgggcgacgcggagctgctttgggtgatgagcgcctttttcctcccacacgcagccgccacattaagctttgtgtttctgcgctttacaagccgtatcgcttactccgtgatgctcattagtttcgctgtcaccggggtctgtttgctatatgttccttttttagctgcattgttcacggtttgcatcacacacgcctgtattgggctggcgctcggcttcgtttttcctctgctgctaagccatgtcgtcgaaatcagttctgcccgtttaaaaatgtcagtgatggggttttaccaatcattttatgcgctaggcatcttcctcgggccccttcttgccggaaaaatcgcacagcttatcgggcttgcgggagttttttatggagccggttctctggcatttgccgccttttttgtgatgctcgcgcaaaaacgtaacatgatcaattaatagctttcataccgccggaagcgccacacagaaaacacggccagaagcatgatgcacagaatggagaaagtgagtgaccatccgaaaaaatctgcccgctctccatgaagaaggatatgctccgcctgcttgcaaatctcagccggaagccacttcgcaccatctggaaatagtgaaacagcaaaggaaacggctgctgtgagcccgatcccgcaagccgcagctgctccgacagaccggaatatcgtacttccggcaaggccggcggtcacaataaatatcacccaaagagcgtaaaggccaaggcttgcggcaaagcggctgaatgatgcgtcctcaaacagcagccggacgtaatagtaagcaagcccgtatccagctgcaaacgacataatgccgatcacgctttggatgagccatttactcacgatataatgggctgccgtcacaggccgcgacataatcagcgctgttaccccttgatttctttcattggctacactgcccatcacgctaaagatgaccagagccatgccaagcgtgttgaattgagaaagcgtgctgaccatcacttcagacccggagggcatcgtaaaactgattttcatgccgtcaggaaggttccctccatgtgcgatgatttccggcatataataaatggtcagcggctgtgtcagcccgacgatcatcatcgcaatcggcagccaaatcagcttgccgcttttccatccttccagccactccttctgcaatagcgccatcatcaccttcatgcgtgcaccacctttagatagacgtcttctagagactccgttttctgttcaaagcgggtgacggtcaatccctttcggatacagtcacttaataatgaccggccagcgtgtatatcaggcagcttgaaaaccgcttgggacggattcttatagacaatagctgagacgtaaggcttctcttcaagccaaccttccagcttctctttcactgaaagggtaaaaacgttcgtttgctgctgttgtttcagctcctgtaactcgcctttccatgaaatctcaccgtttttcataatcaccacttgatcacacacctgttctgcatcgtgcaaaacatgtgtagaaaacagaacggccatatgctttttcagctcccgcatcatgtccagcacctcgaaccgtcctgtcggatcaagcgcagacaccggttcatccaatatcaaaaacttcggtttatggagcagtgcctgtgccagaccgagtctttgtttcatgcctcctgaatagcccccgatccttttgtgcgccgcttcgtgcaaaccgacaaattccagcatctcgccgattttctcttggcattttctcttcgaaaggccggacagtctccccgcaaatgtcaaaaattcatttgcggtcatccacgaataaaaagcaggatactgcgggaggtacccaatcaaacgccgatccagctttttctctcctaacagctttatggttccagaggttggcgaaagcagtccggccagcatttgcagagtcgtggttttgccggctccattaggtcctaatagtgcgacacactcattttcattcacgtgaaaactgacattctttacagcttcatggtgcctgtacgatttgcataatgattcaatagacagcatatcggcttacctttgctttctgccgacggtgaaaaataaaatcggcccgataatattgatacatacgatgattgcagcccacatccactttggcccgttcgtccgctcttcttttatacagctgataagggcaaacaccgccaaagccagctgtaatacaatcagcggcaaaatcatttcccaagaaatattcattgcttgatcccccttttcttccgatccggcctaatgacaaaaaagtaataacaaatcagaggcatcggtgcttgaatcaatccgacaatcccccaaacccatgccatgtgattacgttttttcgcatcaataaataaaaagattccctgcgccaatacgatgagacaagccgcaaccgttatgataatttctgtttgtgtcatccgcgtttcacctcgcattcgccgagatgcctttttttctcagccgcaatcaaaatcggcagcaccgcaagcacacaaacctgaagcacaataaacacagcaggagcttgagtgaaagctaagattgcagcactcacaaccatcagcgcgcagaatacaaataaaatgatctcttgaagaagtttttttctgtattcagctttcatttgtgacagctggtgaagcagttctttttgattcggtatagagggattggctgtttgatcaatttttttccattctgactttaaatgatcagaaagcttttctttattcatcatcccactcctttctgatttgctggagccctttatgaactctggactttacagtgccttctttgatttgaagcatcaccccgatttcagcgtaggtatagccgtagtaatgccttaataaaaccggtgtgcgcagtttagggtccagctttgaaaacagatcgagcgtttcgctccactctgcccctttcgccgacacgtcccacttgatcttgcggattgtttcctccgtaactgtctgattccgtttccattctctctttctctttttctggtgatcgagatagagccgcgatgcaatggagatcagccatgtggagaattttgaacggccctgaaagcttcttaaatggatgtaccctttcagaaaggtttcctgaacaagttcctcgctgagatcggggtgaagggaaagctttaacaagtatttatataagaaagaatagtgatagtggaaaagggctgtaaacgcctcgtcgtttccctctttcgcctgctggatcagccgctgttcttcttgtgtatccaatgaccgtgatccccccttttttgtttttctgccttatgagacgacaccggattcaaaagcgttcatcttttttacaattcttttcagccattgacagatcaggcttcccggccgtttggctgcatatccttatttgtaaacccccttatagtctgttaagctatgactttatgtcgatttcaaaaaaacatccaatatggaggacgatgcattgaaagtagaaaggcgaacgattgaatatattccgaatgaagaaagacatggtaaagcgaaagatttatttcccgtatggttcggggctaatatgcatatcaccacgttagtgaccggcacgattcccgttgcaatgggacttaatctgttttggagtgttgccgctattatttgcggaaccttaatcggtgccatatttatggcttctcattccgcgcaaggccctcagctaggcatcccgcaaatgattcaaagccgtgcccaattcggcgtaatcggagcgattcttcccctcttcttagtcatgtttatctaccttggtttcttcgcaagcagcacgattctggcggccggaaccttaagcagctttgttcccatcccgggatcatggagcattataggcttaagtgccgtatgttttttactcaccattttcggccatgatttgattcacaaaatgcaaaaaatcctttcttggacctcttttgctgtattttttgctgcaacgattctcatttttcaattgccgattccggcaggcagctggatacccggagcgattgatctgccaattttcctagtggcagtcagcgcagttgcgacgtggcagcttgcctacgcgccgtatgttgccgattattcaagatatctgccagttaaaacaccggcttcaaaaacattttggtacagctatgcaggtacatctgtcagctccatctggatgatgctgctcggcgcattgctgacaacctcacttcctgactttacggcaaactcaggcagccagattgtccaattgttcggtcccttctcgtttattatgctgatcattgtgctatttgggcaaatggcaatcaatgtttttaacctgtatggggctttcatgtccacgacaacaacgctggagccgtttctgaaattaaaagtcacgcccaaagtcagaatcatcatgatcctgggtgtcacgcttgtcggcacagtcttaagcctactgggacagagcaattttatggaactgtttttgaattttatctttttcatcagttatttcttaattccgtggacggcaatcaatttagtcgattactacttcgtccgccacggaaagtatcaagtcaaagccatgttcgacgtaaacgggccttatggaaaggtcaattggatcaccacaattgcgttcgttctgtctatcttgctggaaattccgtttatcaacacaagcttttacatcggaccgcttgccaaaatgtttggcggcggagacatcgcatggattatcggcttggccgtgccttctgtgctttactatgtattaatgaaaccgcgtctgaaaaaacgggcggggtatcaagaaaagctgtcttctctctgaagacagcttttttatcattcaaatcgtttccacacgcggggcaggatgtcagatagctcatgagcgagcaacgtatgagcggagtgctcgtccgtccagagctcggcgcacgcaccatgcaaatagaccgcgtttaatacggcgtgctttggatcttcatggcagcagagcatccccaatatcatgcccgtcagcgtgtcaccggttccgcccttggcgagcgccccgtttccggttggattgagccagcagtctccatcaggaaacgcgatgacggtttggtttccttttaacacaatgacagtctgcagctgagccgcccattcctttgcatattccgctctttttttctgcaattcgttcacgggcacccctgtcattcggaaaaactcgcccgggtgcggcgtgaggatgacggggccctcccgtttcggatatgtgcgcttcgccagcgctccggcatccaaaataacaggacaatcagccgtaagcacatgatcgactgcctgctgtacgctttccgtttgcggaaggcccggtccgatggcaatggcccggtacgtctcttcaagctgagcatccgccgcctttttccagccgtcacgccaataggtcgcctcgggcaaaacaggaacaattagcgggattacgttttctgatgtaccgatgacaagcttgccgagaccgctccgcatggccccaagccctgcaagcagcgctgctcccggcatgtcgtcacttccagccagcagcaaagccgtaccgtacgtgcctttatggctctccgcatctctttcaggaagcgtggcccttacatgctcttccgtccaaaatggaacattcatctctatccctcctctgctttcttttcctatttttcctgtcccttttctttttcaaacaaaaaagacagccttttagggctgtcttttattttacaggaacatcaaggtgatacaggcggcgatatcgttcgtttgccgccagcagctcctcatgggttccttccatttctgttttgccgttttcgagaaatacgattttatcggctgcttccactcccgcgagatggtgtgtaatccataaaatcgtttttcctttcagcacctcaaacaccgtttccatcaattcacgttcggtaataggatcgaggccgactgttggctcatcgaggatgatgatcggtgtatcctgcagcaaaatcctcgcaagtgcgatccgctggcgctctccaccggaaaaacggatgccggtttcttgtacagaggtatgatatccgtcaggcaatgactcaatgtagtcatgcagcttgacctgctttgcggcgcggcgcacatcctcgtcgcttgcttctccgtttccgagcctgatgttgttcaaaatgcttgtatcaaacaggtgcggtttttgatttaacacggccaccgcatccgcaatctgatcctttaacagcgctgtctccactccgtttaacgtcacagaaccggagtccggtttcaaggcgccttcgattaatgcaagcgatgttgatttcccagagccgcttcggccgagcagcgccattttttctccttggcgcagcgtaaaggaaaagttgtgcagcacttggctgctgttgtcataagaaaacgtcacatcacgaaaggccaaggtgacatcttgaagatcgagaatttgatcccctgattcagtttgtgacgcctccggctgaggagccacattgttcatgcgtctgatagaatcctgatagcccggcacttcgcctaaggcatccgaaagcggcaaaaaggcttccgtcaacggaaacaccactagcacaaaagcggcaatcatcgttttagcgagctcgccgtccgcttgctgtcccgctgtccaaaacagcatcagcaaaataaggccagcgacaaggcattgcgcagcaaagtcccgccatcttgtaaagcgttgttttttccgttcaagctcaaaccaatcacgttcctctttttcataagcatcaataaaagcatgccggcgtccgctgaacatccagtcgctgacacccatcacagcatctgtcagacggctgtacagcacattccgtccgcttttcagcttcgcattcttcgctctcgtcacgagcaaagacacaaccggaaacaatacaacaagaacaaacaaatacagcgcaagcaatatggcaaacggccaagagaagaagccgagcgctatcactgacacagcatacaggagcaaggctgagatcgcaggaaaaatcgtttttaagaaagcatcctgcaaatgctcaatatcctcagacaaaatgccgagcatatcccccgtgcgaaaacgggaacgcagcatcaaagcacccggctcaagcatattgtaaaggcggacgcgcatgtcagatacgattttcaaaatgatgtgatggccgacgagccgttccacatatcgcgacacagagcgcgcaatcccaaaggtgcgcacagcgacaatcggcacataaatgagcagaatgttttccggccttgtcgccgctttagaaatcaaaaaacctgaggtgaacatgagaaaagcagcagaaaaaatcgtcaccgcacccaaaaagataaccagaacgaacaggcgggcattttgcttgatatacggcaaaatccattcttctttcttcatgctctttcccccagttgtgccttcacgagtttggtatacacaccgtttttctccagcagttcattgtgagtcccaatttccgcaaccctgcccccgtcaagcacgataatttcgtccatatcgagcatccagtgaaggcggtgagtcgcgagaaagacgagcttatcctcaaataaatccagcatcgtttcttttatttcatattctgtttcgatatcaagatgggcggtcggctcatccagcagcaggatcggacggtttcccaaaaaggcgcgggccagcgcgacacgctgtgcctggccgccgctgagcgcccggccgccttccccgatccgcccctctaatccgtcaggaaggttgttcaccagctccgtcagtcccgctgaggcagcagcacgtgttgtatcctctgccgaagcgcttggatggtagaagcgaatgttgttgccaagcgtatcatcaaaaatgtacggatgctggggaatgtaaagaaggttcttctgccagctgccgtcctgcaaatgggaccggcttgtaccattaacctcaatcatcccgccatccggctctaaaaatccgccgagaatatcaattaatgttgattttccggcgccgcttgcaccgataatgccgatttttttcttgcctttgaatgagagatgaatatcagacaccgaacggccgactgacacgcctgacagcttcagctcatcctgatcggaccaagcttcgagctgaagcggcgtctcttctttaaaaccaggctgcgacaaaatctcttgaatggtttttcctgcttcctggccgttcagcgttgcatgataatcattccccacttcccgcaccggcaaaaaatactcaggcgccagaataagcgccgttaaagcagggccaagcaaaatatcgccgtcaatgaggcgcaggcccagaaatactgcgactgtcgccaccgacagcatcgtgaaaaaatcgagggcgaatgatgacaaaaacgccacccggagtgtgctcatcgttgccttgcgataccgctcactcacatagaaaatatttttgctgtgtgacttgctcaaacctaggaaacgcaatgtctccagcccgcgaagagaatcaacaaaatgattggaaagtctctgataggatttccactgacgatccgcttttctctgcgcgacaaggccgaggagaatcataaagatgatcagaatcggcatagcagcgactaaaatgatggctgatgtccgatcctgaaaaaacacataaatgacaactgccgcaggcacaatcgccatgctgaccattttcggcagaaacagctccaggtagcggcggaactggctgatgccttccatcgccagcgtcaccatttgccccgtcccctctttctttgcaaagcgggggcctaatcggaacagctgatcaagaaaacttttcctcaaatctgctcctgtccgggcggcgtattgatagacgattttctgtcgcgccaccgtcatcccgtgccgggcgataaaagcgatgaggaaaaagccgatcaccggtaaaagggaggtaatgcccttcccgttgaacagtccggttacggcctcactcagccactctgcctgcataataatggcggctgtctgaatcaacgttaaacaagtaatcaaggtgagaatccgcttcattcctttatatcgaaacaggtcttttcccattaataagtcataggctccttatggctgacgcgcttccggaagacataatagctccagatctggctgccgatgacgaacggcaatagcgttaatgctgcaattgacatgactttaagcgaataatctccagaagaagcgttagctactgttaaatcgtatgcgctatgaagcgagctgaccattacacgagggaatagggaaataaagatcattcccacggtcagcgccagaccagcgcctgtcatcccaaatgtccagccgtcttttttcttacgaataaatacagccgcgagcataaagcagatgacaatcaaaacagcgagcggaatggtaatctcgccgcggcgtgtaaacatgtctgtctgatacgcagaaagggccgcgaaggcaagaaccgctacaaaaacaacacccattatcttttgcgccattttccgggcgcggttttgcaaatcaccaatcgtacgcagcgtgataaacattaatccatgctggaagcaaagaagcgttaccgtcacaccgccaagtatagaatatacattgatataatcagatacatgtgcgtgaatgttcatgtcggcatcaatcggcatcccgcggaataatgtcgtgaacagcacaccaagcacaaacggaggaattagactgccgaaaaaaacgacccagtcccaaacctttacccattttaaatgatccaccttgccgcggaactcaaacgcgaccccgcggcccattaacgcaagcagcactatgacaaacggaatgtaataaccgctcagcatcgttgcataccagtttgggaatgccgcgaaaatggcgcctgcgccagtcaaaagccacacttcattcgcgtcccagaacggcccgatcgtgttgatcagcactctgcgttctaattcattatggccaagaaaacgggtcgccatgccgaccccgaaatcaaagccttccaaaaagaagaatcctacaaacaatacagcaacgagtataaaccaaagatcatgaagagatgccatggtatacctcctgactaaatggatctgttgatacaggcacatcatgatgattatcatgctccgcaccttttttaatctcacggataaacaagaagacaagcagtgcaccaagaatcatgtacatcacaccgaatgcgatgattgagaataacaaggaacccgctgttacgttaggcgacacagattgagcggttgtcattaaccccataaccgtccaaggctgacgtccgatttctgtcataatccagcccgcggagtttgcaagaaacgggaaggaaatcaacgcgatcatgatgcgcaaataccatttgctgttttcaagctttttacggcggtttaaccaaaggccgcctaacgcagcaagaatcatgacaacacctgctcctaccatgatgcggaagctccagaatgtcgttttcactggcggaatgtagtcgccttttccgtatattttttcgtactcagcctgaagggttttcatccctttgacacttccgctgaatttctgataagccaagtagctcaaggcataaggaactttgatttcatttgagcttttttcattttttgtatcgatcgtcgcaaaagcggtccaagcagcagggtcaccgctgtcttcccataggccttcactggcagccattttcatcggctgtgattccatcaagtgctcagcctgcatgtgtccgctaaggccgacgccaagaccggcacaaagaccgacgatcattgcgagtttaaaagattgcttaaagaacggcacttcttttttcttcagcagtttaaaagcactcactccggcaataaagaaagctccagtggcaagcgcaccgaaaataacgtgcgggaattcaacccaaagctgagggtttgtaatcaacgcgccaaaatcattcatttccgcgcggccgtttttgatcgtaaagccgaccggctcctgcataaaggagtttgctgttaaaatccagaaagatgacatgatcgttccgaatgatacgagccatatgcagagcgcgtgaattttcttcggcaggcggtcccagccaaaaatccataatccgataaaaatagattccatgaaaaacgccaataatgcttcaatcgcaagcggagcgccaaatacatctccgacaaaacgggagtaatctgaccagttcagtccaaactggaattcttgcaaaatccccgttacaacaccgactgcgaaatttattaagaataagtgtccccaaaactttgccattttgagatacagctcatttttctttacaagataaagagtctccatcaacgcaaccataaacacaagcccgatagacatcggcacaaacaagaagtgaaacaacgttgttgatgcaaattgtatgcgggctaataccaattcactcatgctttctcctccatttccggttaaaactgttaatttgctcactacttcacaaatagaaccgagactttgatcagtaattcacaaaatagacgaaaaaaatattgctcaatatttcacaaatgtgtcaaaaagtcatccaatatgatgcaagattgccagactgaccaaatgacacaatctctgactggttcatattaagtactttacaacgattcatttcaaaaataaagcctaaaatacctaaaaagtcccgcactatgtgacggatttttgtctattttgttgcttatttatgtcggctgctaggataaatgaccctttattatcgtacatcaacacatcgttccttgcgaacaaaatgcttgcccccgccccagcactcgagtctcagcattccgtcttaaaccgattttagtcagaatgcctcttttcatttgaaccggtaagaggagaaaagttgaatagtaaatttttaatatattaataatttcaattttttagtatacttaacatagtgaacaatttcactgcatcaagaataggggaggtttttcaatgggagagcttcaaacacacatgcaattgcaaacggatacaattcacgaaggggttcgaaaagagaattggtttgcgaaagccatgaatataaaagtaggcatcataccgcttcctgtgtatgccttgctgtttatattaatcactgtttttgttatgcatcacgatgtaaaaagtgacattttgacatccattgccgtcatggcgtttttcgggtttacctttgcccaaatcggcaaatcgataccgattgttcgttctatcggcggcccggccatcctagctacttttattccgtccgctgtcgtgtactatcacctgctgcctaatgatatcgtcaaatccaccacagaatttacagaaaactcaaactttctatatttgtttatcgccggtattgtcgtcggaagcattctcggcatgaaaagagaaacactcgtaaaagcattcatgaaaatctttattccgcttattgtcggttctgtcacagccgctattgtcggactggctgtcgggacattgctcggactcggatttcagcataccctgctgtacattgtcattccgatcatggctggaggagtcggagaaggcgctatcccgctgtccatcggatattctgacatcatgcccatttctcaaggggaagcgtttgcacttgttctgccatcgattatgctgggcagcttgtgcgcgattattctagcgggattgctgaaccgaatcggaaagaaaaaaccggaatggacaggcaacggcaaagtggaccgctccgaagaagagtcccctgcgctggaggaatctcaaagcggacagcaaatgttcaacctttctttatttgcgtcaggcggtatccttgctgtttctttatacttagtcggcatgctcgctcacgattttttcggttttccggcacccgttgccatgctgttactggctgttctaatcaagctgttcagattggtgcctgcctcaattgaaaatggcgcgtttggagtgtcccgcttcttttcaacagctgtgacctacccgcttctctttgcgattggggtatccatgacgccgtgggacaagcttgtcgccgcttttaacctcagcaatattatcacgattctgtctgtcgttgtgaccatgatggccgttggcttcttcactggaaaatggctgaacatgtatccgattgaaaccgccattattaatgcatgccattctgggcaaggcggcacgggtgacgttgccattttaagcgccgctgaaaggcttgagctaatgcctttcgcccaggtgtctacccgcatcgggggcgcgattacagtatccttaaccttattgctgctgcaccagttttattgatccccgcaagcaagttcttcgtcaaacgaaagagcttgcttttttgcatgtccatgtttttgcaagttcccatcccatgctatagtaatagttggaaatactagatagaaaggaatctggcatgcctatgggaactcatctatttctctttatgcttctcgggctgggattttatttgatatcagccctagctgcaaaactcattccggccatagacttctggattgatattgttctatgggtcggcgctgcggcttacatcttctctcatctctcattcatggacggcattgtctcactcgcgacaatgttctactgctattggaccgcaatggatctcattgtttcagagcgtgtggaaaaaccttcgggagactggcaggaaatcgagcttgccaaaaacaaaacacgcctcctgtcagacattacgctgaccgccattgtgtttgcaggggctgtcatttttttcatctatggacctgacacaagccctctcaaatatgtgatccttctcggaatgatctccggcggaggggcacttgtgaagcgaatactgaatgtttttagcgtaaaggttttttattcagcagccttagaaaaattgcatatcagctcacactatgaaacccgtacatacccgctttccgatttgaagaacattcagcttgaatcaacagcagatctcttaaagctccatccgcttctgacgatgtattcatcccgtttagatttgacaacaagctttcagcaagtcattaaactgtctcttcccggcgaaacactgtttctgacggtgaaggaaccgcaaaaatggaaaacaattcttcaggaatacacagatgcagaaaacaatgtggacaatgtgatttctgttttgccgttttatcatcgaaaaaatgtgaagcggctgctcggtaagctttattttgccgccagcgtaaaaggggtatccgcttacgccttattggtgctcgcgttatacgcattacacgcctctccatgggtcatggctgttgccgtaatcctatattgggtattcaacatgtatatgtcagaccgtgtgttgcgggcggcgatggacgccaagtcttgtcatcatccgcatgtacaggccgcggccgataagattttcagatcggccggcatttcccatgtccgcatatacgaaacggagagtgatgattacaacggaatggcagtaggcatgaatgtcgggaggtcaatggtcatcctgacaagcgccacactaacacttccacagcgtgtcattgaaggcattctggcccatgaggcgattcatatcaaaaaacgtgacgttctgtcatcacagcttttgcgttttctatatcttggagctgtcgtggggattttcctcttgtttgagcagcatatcacccatcccgaggcccacaaaattgcgctttgggctttcattatggcaatcattatcctattccagctctatcaatccttttgttcacaatggatggaggtgcgtgctgacaaccttggcgcatcattgctggacggcggttacaaacaaatggctgaagccttgagaatcttggcggttcggcaagatgaggatatacagaaacaaagtgcctatagctctgaagcaggtgaagacgagcttcaaattgattctctcacccgtgataaaagctggtttttcagattgattgattttcagttcgctcctcatcctcctatgtattggcgtgtcggcactttattgtcaaacaaaggacatggggtgctaaagcgctggctcagagaccgactgaaagaatcgatcactttgaaatgaaaccggtcagcgtttcatccgtataacagatatggtgaaaaaagggagtgacgcgaagtgattgtgatcatcttattgtttatatctattattgtttttctttcagtcattcagccgcagccctcgaaaaacaaaagccgccagcaggcggacagcgggtatttcggttattcagatcatagctcacaccatgatggatgcagcagtgacggaggtttcagcgattccggctgtggcggcggagggggcggcgattaaacgccgcctttttttatttcattgattcgatgtacgcaccaaaagccgagcctgacatgcctggggacacgcgcacacgatggagggcatacattccctggtctctcgaagccgcgcccggttctgtcgtcacgcccatttgatagcctgttttttcagcggccttcagcgtctcctcattgtagcgccctaccggatagctgatgatggtggtttgctgatgaaacatgttgtcgaacagctttttcgaatcagccatctcactttgctgctgttgaggcgttaatccgttcagctcaaggtggtcaatcgtatggctttcaatcgatatgccgtgctgtgccatttccttcatttgttcctctgtcagatggtgcttatgtccgatcgatttgccgatcataaaaatcgttgccttcatcccgtactttttcagcaccggatacgcatcttgataattgtcggtgtacccgtcatcaaatgtgatcagcacgcacttctcactcggttttttatcctgcgtcagcatgagagatgcctctttcggcgttaatgtctgatagccgttatcatgaagccacttcatatgcgcctcgaattctttctttggcacacggaggctgtttcctgaagaaatgctgtggtacatcaaaatcggcagctttgccggtttctctgttttgatccatgcggatgtatcgtcttcttttttctgaacttgtactgcctttttttccggtttcttttgttccgcttttggcatcggctgctctgcattcgcctcttgatcagcacaagccgcaagagccaaacagctgcccaaaagaaagatgcttaaaaacaatcgtttcatcgttctcctgctttctgtctatttcttcctcctttttcatcggtttgattctgagattttcaatagcaaaaaaccggacatgtctccatgtccggtttttttgatcttatcggattctcacttctgtctcactgtcaaagaaatggcctttattcatatcaaatgcaaccgtcagctcatcgcccgattgaatatcgaggcgggcgtcgatccgcgcaataaagtcttggttgtctatctgcgaataaatcataatttcagaaccgagcagctctgcaacattaattttcgccttaatcgaagagttcttatatgattccacgacaatcaattcatcatgtatatcctcaggacggatgccgaagatgacctctttgccgatgtagcctttttcacgcagcactttcatttttccttccgggacggttaatgccgcagaaccgattttgattaagccatccgtgagctttcctttgaaaaaattcatcgccggtgatccgataaacccgccgacaaagacgttttcagggaattcatatacatccttcggcgtcccgatctgctgaattttcccatctttcatgactacaatccgtgtcgccattgtcagcgcttctgtctggtcatgcgtcacataaatcgttgtagtctgcaatctctggtggagcttaatgatttccgcccgcatttgcaccctcagcttcgcgtccaggtttgacaaaggctcatccatcaggaacacctttgcatcccgcacgattgcccggcccagcgcaacccgctgtctctgtccgcctgacagcgctttcggtttacggtgcaaatattcctcaagcccgagaattttagcggcttcttcgactctttttttgatttcaggcttcggcattttccgaagcttgagcccgaacgcgatattatcgtagaccgtcatatgcggataaagcgcgtagttctgaaataccatcgcgatatccctgtcctttggcgctacatcattgacccgttttccttcaatataaaaatcacctttcgaaatttcttcaagtcctgcgaccattcgcagcgtcgttgatttcccgcagccggacgggccgacgaatacgataaattccttatcggcaatatgaaggttaaagtcatcaaccgccggttccttctgatcataaaatttataaatgtgctccatccgcaattcagccatctaacatccccctttgttattgtaaacgctttcttatattgagtgtaacagcaattccctctcgctaaaatgggcagcgttcataaaatcacccagccatttttcgtgcatatttccaatttattctgaactttcattttgcaggcagataaaataggcaagaagcgcgcctttgtacgatttgatatctatccctgaccgctcaataaatttatcaatccgatattgcaggctgttgcgatgcagatgcagctttttcgctgttaatgtgacgtttgagttgttttcaataaacagcttaatggtcttccttagctcagattcacttccaaataaaagctcagcttcttcagagagcagtgtttccagtttttctttttctgtttctaataatagaaaaggaaagatcatctcaaaggtcacactctgcacctgaggcagccgtttttcagcaaacaggaaatacgcctgttcacgagcgtaatgttttcgcagacactcatccggctcgtaaaatcttccggcgtaaaaacggacactgaagtagaaatcactttcaagaaccttagcgagcgattccagttcgtccttctccgccgccgcttcactttcctgctcgacaatcacacctctgtcctcatggatccacacaatcacaaaagacaccggccaaaaatggcgaaccgcttccgtaaaggacgtcctttctattttgccgaataaatgaaagtgaacaaatctcgtccgtttctttatatacgccggcaattcccctctggaaaaaaggaacgaaaaccacttgttttcctcaggtgatttcatagacagttgattgccctcatccgcaggcgtcaaaaatgactgcagcaccaatacttctttttcactgatctctgttttcggaatggagatatatctctgattgctctcatcaaaaaaacatagacagccttcccttatgcaaagctcctcagacacaatcgaaccgggataaatagccagcagcgatttcatagagtctcctctcttatgtaaggatctgtatattcagtataaggcgaaacacacatgttctccactaaaaaagagtatatccggtatagatagacgagaaactgaaagggaaacctcattcgtttacatattggcttcagcggaaatagaagaagacatgcaggaccaaaggagggtcatcttatgagtttcgaaacgttaaacaaaagttttatcaacggaaaatggactgggggagaaagcggacgtacggaggacattttgaatccgtatgaccagtctgtgatcacaacagcatctttggcaacgggcaaacagcttgaggatgcgtttgacattgcacagaaagcccaaaaagagtgggccaagagcacgacggaagaccgaaaagccgtgctgcaaaaagcgcgcggctatttacacgaaaaccgtgatgacatcattatgatgatcgcccgcgaaactggcggaacgatcattaaatcaacaatcgagctggaacaaacgattgcgattttagatgaagccatgacgtatactggtgaattaggcggcgtcaaagaggtgccatccgacattgaagggaaaaccaataagatttaccgccttccgctaggtgtcatttcatcgatttctccatttaatttcccaatgaatctatccatgagatccattgcgcccgcaattgcgctgggtaacagcgttgttcacaagcctgatatccaaactgctatttccggcgggaccatcattgcgaaagcgtttgaacacgccggtcttcctgccggtgtccttaacgtcatgctgacggatgtaaaggaaatcggggacggcatgctcaccaatccaatcccgagattaatcagctttacagggtcaacagcagtcgggcgccacatcggtgaaatcgccggtcgcgccttcaaacgaatggcacttgagctcggcggcaacaatccatttgccgttctttcagatgcggatgtcgatcgtgctgtggatgccgcgattttcggaaaatttattcaccagggacaaatctgtatgattatcaacaggatcatcgttcatcaagatgtatacgatgagtttgtagaaaaattcaccgcccgtgtcaaacagcttccgtacggcgatcaaaccgatccgaaaaccgttgtcggcccgctgatcaacgagcgccaaatcgagaaagcgctggagatcattgagcaggcaaagacagacggcattgagcttgcggttgaaggaaaacgcgtcggaaacgtgctgacgccgtacgtctttgtcggtgcggacaacaacagcaaaattgcccaaacggagctgtttgccccaatcgcaaccattattaaagctggcagcgaccaggaagcgattgacatggcaaatgatactgaatacggcctcagctctgcggttttcacttctgatttagaaaaaggcgaaaagttcgccctgcaaattgacagcggcatgacccatgtcaacgaccagtccgtcaatgattcgccgaatattgcctttggcggaaacaaagcaagcggtgtcggccgtttcggcaatccgtgggtcgtcgaggaatttaccgtgacgaaatggatttcgatacagaagcaataccgcaaatatccgttctaaatgaaaaaatccctctgtttcaagtacagagggatttttctttatttagatatatccacaaacccttcgccaaacacatcgcgtacgtcatgtacgatcacaaacgcttttttgtcgcagcttctaatgatttttttcagcatagacagctcctgtttgttaatgacgatatacaaaatctcttttgactggcccgtataatttcccttccctgataaaatcgtcacgccccgatccatcaaggtatttacctgctctgcaatctcactcttattttctgaaatgaccgtaatggcttttttcgtattcaaaccttcaataatgaagtccatcactttggtaccgatatacagcatcacgatcgtaaacatcattttttctgcaccaataataaaataagagctaaatactacgattaaatcaaaaaacaagagtgcatagctgatattccagtctaaatatttattagcaattctggccagaatcgcggaaccggccgtcgtcccgccgacccggataatcatgccgatcccgactccggcaaatacacctgcgaaaatcgtattaatgatcaattcatcagacggaatgctccacccatgtgtcagatgaagaaaaagcgaatttgccgcaaccgcaatgatcgtataaaccgttgtttttccatcaagaaacttgtagccgattaaaagcaaaaacgcatttaagataaagttcgtgacaccaggagaccattgaaacagataatacaaaatcagcgtaatcccagtgactccgccttccccaagatcattgggaatcgcaaataaattaaccgcaagcgcgaagaaaaaagcgccaatcacaagcataagtacatccagcattctctttttcatcacgaaaacactccttttcattgttctgttctagcaaataaaaaaacccaggagaacgctctcgaaaaagagcagaaactcctgggcttttatcccaccgtgtcataacagccaagctgctatgtgttttctctcggtcacagtccaatttgcattgcggaaccctagaaaaccactgtttttatcatatccttttcactttccaatattagcattataagggacggttcgaattggttcaaggggtatttgcggagttttcatcagataagctggaaaaaaatacgatttatctattaaaaaagaacagatataaccgataagaaaaaaagcatatattttacaagcgaatgtaactataaatgataataattataagaaattcataattttatattgactaagagaaataatataggcattatagtacatatgtttcgtacattttattacataggaggaaatataatggcaggaaaactagtaccctgtaaagcttgcggtcaagaaattgcaaagggtgtaaaaaaatgtcctaactgcggtaaggatcaacgtaacttttttatgcgacataaaatcattacgtttattctcgcagttgttgtcatcattattatcggtaatatgattggcggcggaggcggctcagaagccacttccaaaacatcaagcagcagcaaagcagaaactgaaaaaacatacaatatcggtgataccgtaaaaactgaaaaaactgaagtgacggttacgaaggtagaggacagagatactgtcggtactcaatatgttgaaaagaaagcatctgagggaggtacaattgtagctgttcaatatacaattaaaaacgtatctaaaaagccgattagctctttttcaattccaactgttaaattagttgatgctgatggtacttcttatgattctgatattgatgcttctgtaaactatgcaactgagacaaaagttgataactctaaaattttgagtgatctaaatcctaatattaaagtaacaggtgtaaaagcatttgaagttgacaaggaagcttatgcaaaaggcacttggaaactaaaattcagtaatgatgttattgtgaaaatcaaataacagctaacaagggtgcctgtttaggcacccttgttctttaaaaaaggccttctcaattgagaaggcctccattcttattccgcactcttatacccattcacattagaagactgccatctccaggaatcagcacacatttcctcaaggccgcgtttcgcttcccagcctagttctcgcttggctttcgcaggatctgcaaagcatgtggcgatgtctcccggacggcggtccgcaaaacggtatggaacctctttccctgacactttttcaaaggctttgaccatttccagcacgctgtagcctgtgcctgttccaaggttgtatgcatcggctcctgtagagttcaatactttttccagcgccttgacgtggccttctgcgagatcaacgacgtgaatataatcgcgtacgcctgtcccgtcttttgtcggatagtcatttccgaatacgcttaattgctcgagcttcccgactgctacctgtgccacatacggcataaggttatttgggattccgttcgggtcttcaccgatccgtccgcttggatgcgcgccgaacgggttaaagtaacgaagcagcgcaacgctccactcattgtcggctgtatgcaaatcacgcaatatttgttcaagcatgagcttcgtctgcccataaggatttgtcgcgcctaatggaaagtcttccgtaatcggcgatgtttccggaacgccgtatactgtcgcagatgaactgaatacgattttcttgacgccgtatttctccatggcctcgcataaaataaacgttcctgtcaaattgttatgataatatttgaggggaatcgccacagattcgccgactgcttttaaccctgcaaaatgaatcacagcttcgatttcattttcagcaaaaacggaatctaccgcttcccggtccaataaatccgcttcgtagaacgttaaatcttttcctgtaatctccttgacacggttcagcgcttcagctgaactgttggacagattatcaagaacaacaatctcgtagccgctgttcaatagttcaacacatgtgtggctgccaatgtaaccggcaccgccagtaacaagtattgccatgatgtaaaccctcctaaaaaatgacctgttttcattatatagtgtttagaaccggtccacatccatttttaagaagtttaatcgtttattaatagttttttcatattttttagcttaaacccttgccagcaattcgatagaggtttcagcaagaatgtgctctttcatttcttgatagagctcattcaagtaaaagcccggctgaagattcagctcagcatctaaagcatagaccgtcaatgtatacgcatgatccttgtcaggcggtgtcggcccgcaatactggtgaatcacctttggatcgttgcttcccgcaagcggtgaagcaaagctgttttgcccttgtatcatcaagtcctgtctttcctcactcgcatgttcaggaagctctccgatgtaagccggaatattagccgctgtccagtgaatccagctgaatccgcatacgggaatggcgtcatgatcgatgaaagtaagtgcgagcgtctttgctccggacgggatgtcatcaaaatgaattggaaaggatacaaatgggtttccttctctcttatatttttcatccgcgtattttgaatacttgtcatgtaaatatggatttgcttctacgtatatgttcatatgaatccctctctctattttctcgttctataggtatactaaacgaatcgatgtataatcagtgataaacaaatacgcatgtaaacgtaacaatttgttatggataacttgcagtgaaggagatatttcatggatttaaaatggctgcaaacctttattgccgcagcggaatcagagagcttcagggaggcggctgagcatctgtatctcacacagcctgccgtttctcagcatatgaggaaattggaagatgaactggacatgaggttgtttttgcatagcggaagacgagtcgtactgactgacgaaggcaggctctttttgccttatgccaaagaaatgatccatgtttaccaagctggaaagcagaaagtcagtcaatggaaacaggggtacagccgatcactcacgctggccgtacacccctacattgcgtcctatatcttgcctcgctttctgccagcctatatccaaaaacatccgcatgtcgagctttcaactcatgtggctggatctgacgctattaaacaagcggtggaacacaatgaagctgatattggtttgtcgcggaaagacccgaacaccaacactctttattatcagcatatatgcgaaggtacgctttgtctggcggctcctttccaagaaagcagaccggatgctgcatccgtcttaacccgctatcggctgctaacgcatgatcatccgtcatatggggatgcctttttagataacatccgatcacattacccgtatcttcaaatgatggctgtcgggcagacggatacggctgtccacatgatgaaagcgggaatgggggcatctttcctccctacctacattatcaaacaggaagaagccgaaaaaaagctgatggctgtcagcacgcctgcacatctagaattgcctgcgtcccaaacgtttatgatgtggaaaagaaacagcgaagacattcagcattttcacgccatgttacatgactttatgcagcgcgaacaagtatagagctgaaaaatcaatctgccggttgacgtttttctttcctattttcgctatgcttaatgcagaaaggatttgatgacatggcgatgagcccttatatttttattgtattgattcttattattttatcgatgtatcgagaaagaacggtaaagcccgggaagttgctgatcattccactgttgctcttatggggcgtatctgcatcgtttcagccggcgtattttcattccgtattacatgtggcgatcagcggcattttattactgatcgggctggcctgcgggtttggcattgggaagatggtaaatgtacggattcacccggaaaccggaaaggtcacttcacgcggctcacttgggagtgttatcctcattctagtgatactttctttgcgcatggccgcgagaacatggctgcctgagagcaacgagatgtttattgccattattcattctatgttcttcgttcccctcggcaccatcacagcccgcaacatcatgctttacaaagcatacagacgactgaccgctggcaaagtatccattcaataaccgaaagaaggaccagcatgaacggacaaactccggctcggcactactacaagaagcttgtgccgagccttattctcattttgaattgcatacaatttttatctcatccaactaaggctgatcccattttgttagcatttgtatttgcggtatacttagcattcatttggatcattccctatgtggcatccactgctgttagtttgagcatattcatcggactctggctcctgaccgatttcttttgggctgtttccggccaagagcagggtgccgcctattttttgattgtatttttaatgatatatgccgcctttagactcccttcacggctatccttgatcttcacagcatgtttaattggaggcaacatattactcctatcctcacaagggggaagcttgaataccatcatcagcaacatctcgatcatgctcggtctgtacgtcctcttctcctccatgcgtttcagacgagaagcgagaagggaggctgaacggaatcatgctgaattggcaaaaatgcatgtgcagctggagcatgctcataaagaactccagaaagcgcatgcagagctgcaggaggcttctgttctttcattaaggtacgcggtccttgaggaacgtacaagaattgcccgcgacattcatgacagcatcggtcacgagctgacttctgtgattgttcagcttcaatcccttccctatatccttaaaagcagcaaggaggattcagaaaaagtcattcaaaatgtactgagtgtcgccagggagtgtcttcaagaagtgcggtctgttgttcaccaaatgggccgtagtgaatcgatggtggggcttaccgctttgcgggggctcattcatcaagtggaggaacggagcggcttgcacgtttctttagatactgccggactgtcagaagagtcttggcctccaaacgtgagcgaaacgatctaccgcatcttgcaggaagcgctgaccaatatcattcgtcacgctgacgcttctcatgcggcggccgtcatttctaatgacaagtcccatctctatgtcacaatcaccgacgacggacaattcaccggcagccttacttatggatttggcctgacaggaatgaaagagcgcgcagaaaaagcaggcggttcccttactttcagtgccgtacagccgagcggcctgaaaattgagctgtcattgccgctcatgacaacgaataaggagcaaaaagatgaacaaagataaaatacgcgtagcgcttgccgatgatcagccgcttgtgcgtgaaggcttccgctacgtcatcaacgcacagacggatatgacggtttctggcgaggccggcgacggtcacgatattatagcactcgcaaaacaaacaaaacccgatgtcatcctcatggatgtccagatgccgcgttgctcaggcatcgaagcggcgaaagacattatgtccgcacttccaaatacaaagatagtcattttaaccacctttgacacggaagaatacgtatttgaaggcatccgtgcgggcgcagtcggctatctgctgaaggatacacttcctgaggagttgatagatgcgattcgcgctgcggccagaggcgaggcgattttccgtacagtcacagctgctaaaatcatcagtgagacatttcgggcgaaacagcaaactcatgccgaagaactggcagagccgttcaccaaaagagagcttgaggttcttcagcaaatggcctacggactgagaaatgaggatattgctgaaaagcttttcgtcagtgaaagcactgtgaaaacccacgtgcaccgcatcctgcaaaaatgcaatgcccaagaccggacacaggcagtcgtttttgccattcgaaacggtattgtgcaatagaaatctctcatcccgccatgctaaaataagacaaaggagatgattggaaatgaaagaagaaatcattgaacggtttactacatatgtaaaagtcgatacacagtccgatgaatccgttgacacttgtccttccacacccggccaattgacattaggaaacatgctagttgatgaattgaagtccatcggcatgcaggatgcagccattgatgaaaacggctatgtcatggcaactcttccctccaatactgaaaaagacgtgccgacaatcggctttctcgctcacgtcgacaccgctacagactttaccggcaaaaatgtgaatccgcaaatcatcgaaagctatgatggaaaagacatcgttcttaacgaacagctgcaggtcaccctgtcacctgatcaattccctgagctgtccggctataagggccatacactcatcaccacagacggcaccacccttctcggcgcagacaataaggccggtatcgctgaaatcatgacagccatggattacctcatcaaacaccctgaaatcaagcacggcacaatcagagtcgcctttacgcctgatgaagaaatcggaagagggccgcacaaatttgatgtgaaacggttcaatgcatcctttgcctacacggttgacggcgggccgctcggcgagcttgaatatgaaagcttcaatgccgctgccgcaaaaattacgattaaaggcaacaacgtacatcccggaacagctaaaggaaaaatgatcaactctgcgaaaatcgcgatgaagctgaacagcctgctgccggcagacgaagcgcctgaatatacggaaggttatgaaggcttctaccacctgctgtcgattcaaggagacgtagaggaaacaaagctccactacattatcagagactttgacaaagagaatttccaaaacagaaaagaaacaatgaagcgtgccgttgaagaacttcaaaacgaatacgggcaagaccggattctgctggatatgaacgaccaatactacaacatgagagagaaaattgaacctgtcatcgaaatcgtcaacattgccaagcaagcgatggaaaacctcggcatcgaaccgaagatttcccccatccgcggcggaaccgacggatcacagctgtcctacatggggcttccgacgccaaacatctttacaggcggggaaaacttccacggcaaatttgaatacatctcagttgacaacatggtcaaagccgtaaatgtcatcgttgagattgcaaagcagtttgaagcgcaagcataacgccaaaagccagtccaaaaaaggactggcttttttgtgtgaaaatgaaacattttaaacacgtcctccgtaaaacaagtatcaacaaatgaggaggaaaaacaatgacaaaacatgcaatcgctgccaagagtctcttgaaaaaatggatcatttccaggccgcttaacatgaaaaagaaatccagcccatttcaaaaaatcagaaaaatgttcaaacgcttcttcaaataaaacatcaaatcccctaaatacaatccgtattcacccgtaccgcccaaatgctccgtaatttgggttttttgtgttcaattccgcaaaatagggtataaaccaaacaagcaagaaaacagcacccaaaaacaggtaattcgaattacgtaaacttaggttaaaagttatataaaggaatttattttatcgtcgatagtaactatagaaccaatcatcaacaagagcaaacagcgtaattcaagactattttcaggtcatcaggtaatactgttttagagggacagtttcttgttatttattgatttagaattttttgaatactttttggcattttatccgtacaatagagagtaccaaaactttttttgggaggtatgtaatatgatcctatttattatcatcgcattatgcggctatcttcttttttctttcagcaaggacaatcgccgcaaaccgcaaaagacaagccctctgccagcagccgcacctcatcacaacaacctaatcgaccttgacgccatccgccaaaaacgccggatgcatctttcctaattctatatttcaaacgaaaaggctgctgaatcacgcagccttttaaaattgttttgatttagagcctgaaaccttttcgccacctatccgtaatttcatacaaggcaaacccaaaggagacttcagcaatgatcgagttatttatgaaacaaaaaatgttctcatttaaagatgcatttcacatttatgaccgggatgaacaagaaacattcaaggtggaggggcgttttttctcgttaggagactcattacaaatgacagactcatctgggaaaacgctcgtttccatagaacaaaaactaatgtctttattgccgcgctatgagatttcaattggcgggaaaacagtttgtgaggtaacgaagaaagtaacgttttccaaaccgaaatttgtgatttccgggcttaactgggaaatagatggtgatttatggagggatgaattccaactgacggacggggaaaatgtccggatgtcagtgagcaaaaagtggctcagttggggtgattcctatcacttgcagattgcatacgaggaagatgttctgatttgcactgccatcgctatcgtgcttgatatggttttatataacgatgaagatgaaagtattttctaaaaagcattgacaattgatccaaaagtaataatattaagataattgaaatctgaatatgaagttgtaccttatcaagagaggtggagggactggccctatgatacccggcaaccgctgtttcaaacagaatggtgctaaatccttaagaacattgcgttcttgcagatgaggcggagatttgatcgttcaagctcttccttacacaaaggaagagctttttacatgcttaatatttcagaaaagaggcgaataacatggctcaacaaacgaatgttgcaggacaaaaaacagaaaaacaacgcaaagcacctttccgcgccgatcatgtcggcagcttgcttcgttccgttccggtaaaggaagcccggcaaaaaaaagcggctggtgagatgacagcggaacagcttcgtgatatcgaaaatcaagagatcacccgcatcgtggaaaaacaaaaagaaatcggtctcgatgtggtaacagacggggaattccggcgttcctggtggcattatgacttcctggaagggcttgacggtgtggaaccgttcatcccggctgaggggattcagttccataacacaaaaacgaaagcgcgcagcatcaaagtgacgggaaaactcgattttacgagccacccagcgctcggtgattatcaatttttacatgagattgccggtaacgcgacgccaaaattgaccattcccagtccaaatatgctgttttttggcgaaaaggcggataaagggatttatgacgatcaagaggaatactttcatgatatggcccaagcgtacaaaaaagcaatcaaagccttctatgatgctggctgccgttatctccagcttgatgatacgtcatggtctctcttctttgaggacaaaggcagagaggttgtccgggcgctcggcggtgatccagaaacattgccagccatatttgccaaaacaattaacgatgccgtcgcagaccggcctgacgatttaacgatcacaatgcacatttgccgcggcaacttccgctcaacctgggcggcatcaggagggtacgacgctgtagcggaaacgattttggacggcttaaaccttgacggccttttcttggaatacgatgatgaccgctccggaaactttgatccgctccgttttgtgaagcgcaaggatctgcaaattgtgctcggcttgatcacatcgaaatacggcgagcttgaaaatcctgaggatgtgaaacgccgtatcaatgaagccgcgcgttttgtcagcttggaccagctatgcctgagcccgcagtgcggtttcgcctctacagaagaaggcaaccttctgacagaggagcagcaatgggcaaagctgcgccatgtcatcgacattgccaacgatgtgtggagataatctatcattgacagaaatagaaaatgtgtgaataatagatactatcagaaaatttaataaaaaggttttccttatcaagagaggtggagggactggccctgcgatacccggcaaccgctgtttaacagaatggtgctaaatcctttagagcaatgattgctcttgaagataaggttgagattgtcacgcaagctcttccttatccaaaggaagagcttttttatatttgaatggaaagaaggaatggacaacatgtcacaacaaacaacacccgcagaacaaaaatcacttcaaagaaaaaaaccgccgtttcgcgcggatcaagtcggaagcctgctaagatctgagcccgtcaaaaaagcgcggctgcaaaaagcggccggcgaaatgaccgctgagcagcttcgccaaattgaaaacgacgaaatcatccgcattgtggaaaaacagaaggaaaccggcctgaacgtcgtgacagacggtgaattccgcagagcatggtggcactttgatttcctggaaaacttagatggcgttgagccgtttactcctgagcaaggcattcaattccataacgtacagacaaaagcacgcggcattaaagtcacaggcgatatcgacttttcaactcacccaatgcttgaagattactcatttctccatagcattgccggtgacgcgacgccaaagatgacgattccaagtccgaatatgctgtttttccgcggaaaactggaaaaggatgaatacaaaaacgattatcaacttttccagcacgatgtatccaaagcatataaaaaagcgattcaagcgttttatgacagaggctgccgctacctccagcttgatgatacagcgtgggccgttttcttatcagaaaaaggcttaaaacaaatcgaagcgttcggaacaacgcctgacgagcttcgccagctgtttgcgaaatccattaacgacgcgattgcagaccgcccggatgacttgacggtaaccatgcatatttgccgcggcaacttccagtccacttggacagcggaaggcggctatgacgcagcagccgaaaccatttttgacggcttgaatcttgacggacttttcttagagtatgatgattcacgctcaggcggatttgagccgctccgttacgtaaaacggtctgatcttcagcttgttcttggcttagtgacatctaaattcggtgagcttgaaaatccggatgacgtgaaacgccgtatcgaagaagcgtcccgttatgtaagcttagaccagctttgcctcagccctcaatgcggattcgcttcaactgaggaaggcaacaagctgactgaagaacagcaatgggcgaagctccgccatgtggttgagatcgctaatgatgtttggaaataagcaaagaaaaaaacacacttgattccctagcggagcaagtgtgttttttatgtcattgtgcggtgtagcccccatcaaggacgacagcctgcccagtgacgcccttcgccttctcgcttgccaaaaacacggcataatccgcaatttccttgacggaaagcagtcgcttttgcggcacaagcggaaaaatgacttgttcaagtacagagtcgtaagggacatttctagttttcgatagatcgctaagctgattgcgtacaagctgggtatcgacataacccggacagagcgcattgactgttatgccgtggggcgcgccttccagcgcccctacttttgtgagtccaatgacgccgtgcttggcgctattataagcggatttccctgcaaagcccactaatccattaacagacgcaatattaatgattctgccaaactgctgttttttcatgatcggaaaaacatgcttcattgcaataaagggagccgtcagcatgaccttgatcagctgttcaaaggtgtctgtcggaaactcttcaatcggagcgacgtgctgaataccggcattgttcaccagaatatccaagcggccgtattgtttttggatgacgttcaccgtatcagcaacttgcgcttcctttgtcacatcatacggaatggccgccgcgtcaaagccttcttctgcaagcttggaggctgctttttcacatgcttccggacggaggtctgaaacgatgacgctggcaccttcccgggcgaattctcttgcgatttcgaatccgattccgccggcagcccctgtcaccaaagcgacttgttttctcatgtcaaacaccttcccattaagaattgagtacagactggcttacagcgaaatcagcttctgttttttcataaacctcttcaattgtgacaccatcctgaagctccgtcagtgtcatgcggccgttcacaaaatcaaatacagccaaatccgtaatcagcctgtgtacgactttctggcctgtcagcggaagggagcatgtttttttcacctttgattcaccatgcttattgacgtgctccatgatgacaacgattcgtttcgccccgttgacgagatccatggcgccgcccatcccttttaccattttgcccgggatcatccaattggccaaatccccctgctccgaaacctccattccgccgagaatagctaaatcgatatgcccgcctcttatcatcgcgaatgactcagcgctgtcaaaataagaggcgcctgtcacttcagtgatcgtttcctttcccgcattgatcaaatccgcgtcttccgttccttccagaggataggggccaattccgagcaagccgttttccgactgaagcatgacgtgaacgccatcgggtatctcatttgcgacaagcgtcggcattccaatcccgagattcacattcatgccgtccttgatttcttgtacagcccgtttgaccattcgttttctcgcttccttcacttggcctcaccctttcccgatgcttgctgaactgttcgtttttcaatccgtttttcttggctcgcgccaagcacgacatgctgtacgtaaattcccggcgtatggatgtgatctggatcgagctctcctgcttccacgatttcttccgcctcggcaatcgtgatcttgcctgccatggcggcaatgggattgaaatttctcgccgttttcctaaaaatcaaattgcccatggtgtccgctttccacgctttgacgatcgccacatcgccggtaatgcctcgctccagcacataagtccggccgccgaatgttttatgttcttttccctcggctatggaggtgccgacgcctgtcgccgtataaaatcccggtatgcctgcaccgcctgcacgaattctctcagcgagcgttccttggggaacaagctctacctcaagctctccgcttaaaaactgccgctcaaaaattttattttcaccgacataggaagcgatcattttcttgatttgcttgttagccagaagcaaaccaagcccccagtcatcgactccgcagttattgctgacaacggttaaatcctttactccctgatctcttatagacaaaatgagctgttcagggatgccgcacagcccaaaccctcccgcgatcagcgtatccccatcatgaatcagtttcgcagcttccttgcttgatgacagcacttttcccatattgatgcccctttcgttttcttctacactagaccagtcaggctgtaaatcgcgatcacagcaaatacggcagccgttttaatgagcgtgatcgcaaaaatatcgcgataggattgccggtgggtcaaacccgtcacggccagaagcgtgataacggcgccattatgcggcagtgtatccatcccgcctgatgccattgaaatgacccgatgcatcacctctggcggaatattgtaagcctgaatcgcctgtaagtattgttctgacatcgcgcttaacgcaatgcccattcctcccgaagccgagccggtgattcccgccagcgcagttgtcgtaacggcgccatttacaagcggatcggtaaaagtatgtgaaattccgctgctcagcttatgaaaccccggcagcgcggcgataatgccgccgaacccgtactcagcacccgtattcatagatgccagcaaggcgccgccaattccttcattcagcccttccttcaattgggcaaacacacttctccaatcaaataatatcgttgtgatgatgccaatcactaaagcaatctccaccgaccaaatagcagccgctgaagaaatatcaagcctgccgaactcctttaatcctatggaagaaaaatcaaatccattcggataccactttggcaggtaaatggtgaaatatttattcactgcaccgacgagaataagcgggacaaaggcaagcgcgtgccgaatcgggcttttgtccggttcagccgcggactcaatcgattcaggagcaggagcattctgcgaatcaaaaccgccatagccttcgccagatgcctgcgctttcttccgccttgattccaaatagagcatcccagctgccagcacaatcactgcgcccatcaaacccagccaaggggcggcataaatgtctgttttgaaaaacgacgtcgggatgacattttggatttgcggcgttcccggaagtgcgtccatcgtaaacgtaaaagctcctaaagcaatcgtacccgggatgaggcgttttggtatgtttgcttcttggaacatgtttttcgcaaaaggatatacagcaaatacgacaacaaacaggctgacaccgctgtacgtcaagacagcacccatcagcacaatggcaagtatcgctctttttgccccgacaagccggacaattgttttcgcgattgatgccgcaagcccggccatttcaacgacctttccaaaaatagcaccgagcaaaaacactgggaaatacagcttaataaaacccgccatcttctccataaaaattgatgaaaaaaaaggaagcacatggcttggatctgtcagcagcaccgcgaataacgcgcaaatcggcgcaaacaatatgacagaaaatccccgatacgccgtaaacatcagcaaacctaacgccaatagaatgatgatcagttccacacacacatcccccgtttccgcgaactagaaagcgtttacaaaaacctgtccgcatcggctgtttccgtcccctttccatatgtacgagaagcgtgggccaactattccgattaaaaaaggaaagctccttttttcggagctttcctctaccattcatttcattcctattaggatatcaacatcaaccgtaatatcggctgatttcatctctttcagcaggctgactcgatctttcggcgccgaccaggcaagcggcgtcatcttgagaagccagtggatcgcctgctggtcaagcgttttaacatagcgcagcctgacaggacggctgtgtgctgcatttgctgtaaaacgctcaactgctgccgtattggaatacgtgcgccttggtgaatcagtatataaaaattgccttaattctattaaatagtcgcttcgcggcactacttttatgagcatgccatcattcttcagcagtctatgaaactctgcataattggacggcgaaaaaatagacagaacaacatcaaattggcgatcatgaaaaggagcacgcgccacatcggcaaccgcccacatcagatctttgaatgccttagaagcttttaagatcccgtccttcgaaagatctatgccggttcctatcgctgctttccctgcataatcaaacccgcaaagcgcattcaaatgagaaccctcaccgcaaccgctgtccaagatggtgaatgcctcatgaccagatttgggatgactgatgagctctgcaatcgcatcatggagcgggtcaaaaaaaccacattctccaatcagcctgctcctcgcttcaaaaagctcggcaccgtaactggttttgaccggcttcgtcagaaagttcacgtagccgtgccgagatagatcaaatgtatgtcctcgttctgtacaaatcaagcttttccctgatgccgcatccatagaagaatcgcagagcgggcatcgaaacatgctgaaatcaactgttcgcttcatgataaaaaacaccccattcattcatttttagataaatgaaaaaggcatagacaaataaacctaggcctatctcaaaaattggccaggtctggcagtttgtctacacctgtcattatctataacgaatgaattggataatcatgaaaaaaactccctttctgctgtatgggtttccccgtttccatcatacaacaaatatccaggagctggaaccttatagtgaagaaaaatcagtactgacatgctggtatcccgccaacatcatatcagcatagcaatccagcatgtttttcctttattttctcattttagaatataaattttattattgtgaaaatagttaaaaaggttgattttcaaaaagtgaaaggataaaatactgctatcatcttagaaaaagacattcttgtatatgatcagtaatatggtctgattgtttctacctagtaaccgtaaaaaactagactacaagaaagtttgaataaatttgaacgagttgaaaaggacaagttcttttctgtttgctcttatttttcacactttctgcacttccagaatttgtgaaggataagagctttttttgtttccataataaccctcataggagttgctatcatgtactttttactaaaccttgtcggtctcattgtgattatggcagttgtattcctatgttctccgcagaaaaagaaaatcaagtggcgcccgatcattacgttaattgttctggaattgctgattacttggtttatgctgggaacaaaagtcggaagctgggccatcggtaaaatcggtgatttcttcacttggctgattgcttgcgccagtgacggtatcgcgtttgcctttccgtcagtgatggcgaatgaaacagtagactttttctttagtgcgcttcttccaattatctttatcgtcacattctttgatattttaacgtatttcggcattttgccttggctgattgataaaatcggatgggtgatttcaaaggcttcccgcttgccgaaattagaaagctttttctctattcaaatgatgttccttggaaataccgaagcacttgcggtcatccgccagcagcttacggttttaagcaacaaccgcctgctcacattcggtttaatgagcatgagcagcatcagcggctccattatcggatcttatctttcaatggtgcctgcgacatacgtgtttacagccattcctttgaactgcttaaacgcgctgattatcgcaaacctgctgaatcctgttcacgtgccggaggatgaagatatcatctatacaccgcctaaagaagagaagaaagactttttctctacgatttctaacagtatgcttgtcggcatgaacatggttatcgttattttggcaatggtgatcggatatgtcgcattaacgtcagcagttaatggcattcttggcgttttcgtacatggcctgaccatccagacaatttttgcttatctgttcagtccgttcgcattcctgcttggactgccagtgcacgatgcgatgtatgttgctcagctgatgggcatgaaattagcaacgaacgagtttgttgcgatgcttgacttgaaaaacaatctcaaatcccttccgcctcacaccgttgcggtggcgacgacattcctgacgtcctttgcaaacttcagtactgtcggcatgatttacggcacgtacaattcgatccttgacggagaaaagtcaacggtcatcgggagaaacgtgtggaaactgctcgtcagcggaattgcggtatctttattaagtgctgcgattgtcggcctgtttgtgtggtagaaacattgagccatatcccttttcggatatggctcttttcattattgataaatagaggctggcacctgcacatcccggattcccgctgcataaggccccaagtcatactggccgaagacgatggcgatcccgtttgccgtaaagtaaaacattgtgtctctgtttagggttatatcctctttctttacatcagagaaaaacagcacatcgtgttttttgatatagctatataggtaatctctcgttttgctgacttttgttttggtgttcagaatctgatccagcgtcacccgcttttgtgctttcaagtcatagttgaaggactggacagacgttagaccgtgggcgccccctgaatagatataattgagtgtttgaatgctgagcttgcctgccgcattgtatttgacgctgaaggatgtttgatattcccgttttaaagccctgctgttcgcctgcttttttgtttttcaggtattcctgatacgattgttcatgtaggctttcagctcttgattgattttcttttcaaacgcggcattcccgacgtgatgcacttgtggatacgttaactccttgatctttttgtacgtatgggtgctgacagtcggtgttttcgcttgaactgcttttaaagatggggccgcatatgcaaatacagaaaaaagcaagactgcaatgcccgcggctttcagcatgttattccatttcatacaatctactcctttgatgtcgttgtttatcattcccttatttaagcaatacacacttttatagactgattaaatcgaaagaagtttctaggtctaacagcatgatttttccaataaaaaaagagacacaggatgtctctttttttactgtttgcgcccagaaatcgcttcatgaagggcttgtgccaaatctgtatttccgaacatctctaataccgcaatgacagtctggtccggaatgtgctctgcttcgtgttttggcacgaccagatcgtccatggtttttttcaagctttcattcagcttttgctgcggatacgctttggcgtacagctccatcggatcaagatcatggttcacgcaccactgggcaaacaccaaaatcatcatattttcatcgcgttcgtaagcttcagtgagctgtttttcgttcatttgtcatgctccttatgaaaagtatcttccttaaagatacaggagccgatcaaattcgtctatcccaatggcgatgagcagcaaccgcatcgataaatgccttgctgaaagcggtgtagtcaggttcatctttagccgttacgatgcctagcccctctgttgtcccgacagaggattgaagaaggtcaattccttcatttgccgcaccgatcgccttgtagtgattgtaagcttctctgataaacgccatcgcttgtttgttgtcttttaactccagtcctcctgcggcatagacggcatcatacagaacagaatcaaccgtcaggaacgtgccgctggcctcaagctgctgtccgctgccgcttgtcatataccccagattttgactgatgatatccactgtgattccttcttgctttaaggcttccagtactgtttgcagctctttttcatgaaatccgtttccggcgagtacagcgacttttcttgttgacgcggttttcactgtacgggcttggcttaacgcaggcgaagtaagaatttctttagatgctttacgcttcgcgggcgccgccacgcctactcctttggcgatttcttctgctaaatctgcatcgacattgctgaagacatcaacgacctgccgctgtacgtctttgcttttgaccttcccgacctcgaagcagaaagcagaaatgatgtgctgtttctccacaggagacatgctgttccagaaaagcttcgcctgtgagtaataatcgttgaagctgtcgcttcgctggcggatttttttgccctcgactttttcctgatagtggacgtagccgccttcttcagctgtcgcaggcgacggatcattgttttgcagtgagtttttatgataagcgacaggtcccttattgatcgtcatccggtgatagccgtcgtattggttgttatggaatggacagaccggccggttaatcggaatctcatggaagttcgggccgccaagacggatgagctgtgtatccgtataagagaaaagccgcccctgcaatagcgggtcattggtaaaatcgatgcccggcacgacatttcccgggtggaatgcgacttgttctgtttccgcaaacacattatcctgattgcggttcagcgtcatttttccaatgatcttcaccggcacaagctcttccggccacagcttagttgggtcaagaatatcaaaatcaaacttgaattcatcttcctcatcaatcatctgcacgccgagctcgtattcaaccttgccgccgttttcaattgtttcccacaggtcacggcggtggaaatctggatctttcccggcaattttttgcgcttcatcccatacgagagaatgcacgccgagcaccggcttccagtgaaatttcacgaaacgtgcctttccttgttcattgacaaaacggaacgtgtgaacgccgaagccttccatcattctgtagctgcgcgggatgcctctgtcagacatcgtccacatcaccatgtgggcagactcagggttattggcgacaaaatcccaaaatgtatcgtgagcagtcgcagcctgaggcatttcattgtgtggctcaggcttaaacgcgtgaaccaaatccggaaatttgattgcgtcctgaatgaaaaacaccggaatgttatttcccacaaggtcatagtttccttcttcagtataaaattttgtcgcaaagcctctggcatcccgcaccgtgtctgcggagcctttagaacccgcaaccgtagaaaaacggacaaataccggtgtcttcaccgaagggtcctgaagaaatttggcccgtgtgtattccgtcattggttcgtaaacctgaaaaaagccatgcacgccaaatccgcgcgcatgcacaacgcgctccggaatcctctcatggtcaaagtgcgtcattttctcccggaaatgaaaatcctccatcagcgtcgggccgcgaaccccggcttttaacgagtgctcatcctctgacactcgcaagccttggtttgtcgtcattttcttcccgctgttatcggtcctgtactgctcaagctgctcgtcctttgagtgttcatttacacgtttgttttggtcatcactcatgtctgctccccctttttaaaacgaaacattctacagcacatttacccgtggcgttcttcatataaactgctaatccgctcattaggatttttggtctacatataaatatgcggtcatacacatttgaaataagccttcttcacagaaagaaaggatggaagcgcttaccaaaaaagctgttgaataggggaggtcatatcatgcttgccatactcggttttgtgatgatgattgtctttatgtaccttattatgtctaaccggctttccgctcttattgctttgattgtcgttcctattgtgtttgccctgatcagcggatttggcaaagatctcggcgagatgatgattcagggcgttacagacctcgcccctaccggtatcatgctgttattcgccatcctgtatttcggcattatgattgactcaggcctgtttgatcctctcattgccaaaatcttatcgtttgtcaaaggagatccgttaaaaatcgccgtaggcacagcggttctgaccatgaccatttcgctggacggagatgggacaacaacctatatgattaccattgcagcgatgctgcctctctacaaacggctcggcatgaaccgtttggtgttagcgggaatagcgatgcttggttcgggggttatgaatattatcccgtggggcgggccgactgcgagggttttggcttccttaaaattggacacgtcagaggtctttacaccgctgattcccgctatgatcgccggcattctctgggtgatcgccgttgcttatatcctcggaaagaaagagcggaagcggctcggcgtcatttcgattgatcacgcaccgtcttccgacccggaggccgcaccgctcaagcgtcccgctcttcaatggtttaacctgctgctgactgtcgctctgatggccgcactgatcaccagcctgctgccgctccctgttctttttatgactgcgttcgccgttgccttgatggttaactatccaaatgtcaaagagcagcagaaacgaatctcggcgcatgcgggtaatgcgttaaacgttgtctcaatggtgtttgctgcgggcatattcacaggcattctctccggcacaaaaatggtggatgccatggcgcattctctcgtttcactcatccctgatgccatgggcccgcacctgccgttgatcactgcgatcgtcagcatgcccttcacctttttcatgtcgaatgacgccttttacttcggtgtccttcccatcatcgccgaagccgcttccgcttacggaatagacgccgctgaaatcgggagggcctccttgctggggcagcctgtgcatctgctcagcccgcttgtgccttccacctatctattggtaggaatggcaggcgtcagctttggcgaccatcaaaaattcactattaaatgggccgtgggaacaacgattgtgatgaccattgcggcgcttttgattgggattatttctttctaaatgtatgagcttgatcgtagcattgagtgagtacgtgatttacagaggggagaagatcaaataggatattatgagtgaatagaagattcatgccaacaacttctcattacaatcataagagcctgctatattgcagcaggctctttcacatttggcattatttttttgtatagcgcacccagtcataatgagcgtatagcggatttacaccattgtaggagccaagccattcatcgacacccgtgccattccacaagttcatcatgatctttccaggtgttgtcggaatttggtttgttgcagtatgttttaattgcccgtcgacataccatttaatagagtttggctgccaatcgaatgcatacgtatgataggcattggctgcatcaaacccgagatcaacaatcttctcatggtttcctgcaccatttgtataatagttaaattgaaccttcgttgtgtcttttcctaaaaattcgatatcaatctcatcccaaggagttccatctgttggacctgtgtaagtgaagaacgatgaaacgatccctgtgtttttagctggtttcattctgacttcataaagtccatagccatatgtttgaacagaacggttttccccgcagtcaaacttgttataagctgggcttgttagcgctaaacgcatttcacccaatgacgtcattgatacgttattagcccgccacgtgcagttgaacatatttccattcgaataaccatctgctttttgccaaaaaccggagttatagccgttaaaagggtcaaaaaacgatccacctgtttgagctgaggcagtagcagtgactgcaaacaaactcataaacaatccagtgacaagaagcagcaacactcgtttcagataaggcatattggcattcccctttcattgaaagcgttttctatgttgatcttacatgattcttttaaaagggaacatcggtcaaaataatgataatatcgaatcttactaacttgaatcctgtaactatcatcatcttccctctgaaaaaaataaaaacctaaattaccatcagcacagacagagatgatccgcactcattgcaatttaggttttgcctgctttatcagtaacaatcctaccattttcatatgtgaatgtaagaaaaagtgaacacaaggaaacacaaatgtcagcgctctcattatgcttgtttaactaccctttctatgtgaatggttaaatacagcagctcgtcacttgtgagcttgtgctcatactcccgctcaatgtaggtttggattttcttcgtgcattcatacgcgcgatgatacttttctttcactgtatccagcaaaaaatcgtcctggctttccatgtgagtgccgttaaatagacgctgcgcgaaaaactttaagtgggtgacgaaccgataatagtgaagcgattcttcgttgaattcaatcttaaaatggtattttacaatactcaaaatctcttgcatgacttttgtaatgttgataatattgggcatctcttcattcagctcggcatttacaatatgcagagcaataaagcctgcttcatcctctggcagagacacaccagtcttgttttttaccataaccaacgcttctttgccgatcgcaaattcgtctttgtagagccgttttgtttcccacagcaaggcgtttttgatatcaagccctttctggttgcgctggatggcaaagttaatatggtcggtcagcgacacatagatgctgtcgttgagctttttgccgagctgtaattttgcgtagctgataatctcttcggatacttccatacactcgatcggtatatcatacaaaagggttttgaacttttctgatacatccttgttatcgagcgtgaacactttctcaatgcgggcttcatcgacatcatcgccggactttttctgaaacgcgagccccctgcccatgacgaccaattctttcccctgttcattgaccacgctgatcacattattgttgatcaccttcgcaattttcatggcatgtccctccaaatctactaagaacagactatatcttgattgtacattctttttgtactaggtcaatatcatcagggaaagacggaagctggtcagtacaattcactccgtacctgctgcccgggctgtttttgaagcagcgcctccagatggcgttcaaatgatgccttgtcagctttctgctttttgacaatgctgttcatgattttaatgctttcagcactgtattgtgtatattgttttttcagctgatccagctgctgtcttgtcttcttcgcgtttttcggtgtgacttggttgatgagtttgatcatactgtctgcggtctcaaaaaaaccggctctattttctgtcagctgctgaatttcgatgcggctcatatcttgattacgcgttttttgaagcaaggcaaccgcctcgctgttttgttttttgagcgatttgttctcaagcttaatcgattcgagattctccttcgcaatgtctgcttcttcttcagtcatgctgattcgcacgaagtattctggattgccgattccataatcaaatgcttcgctcacttgtatcatggaactgaacacaatggccagctgcctgtcgcttgcgagggcttggaaatcctgctttttcttactgctcatcggtttggctgcggtttgttttactgtcttttgatcacagtctgcgaacatctgagcctcaccttcactttcgcatgcgctcatcacaagaactgtgaccagcaggcttatacacaagcctattcgcctcatgctctgtctcctctctgctgaatcccttctggaaaataccataaaatatagttaaatggtaccagatgcacctaaccccagcaataaatcaaaagtatgatttgaagcgaaaaaacataaatattttgtaaaaattgacgtgcattccattcttttcaggcccatttctcgtacaatagaagtatcgttaccggagaggggctctgatgatgaaacgttttacgaaacaagaaaacagctgggtgttatatgactgggcaaattcagcttactcaattgtcgtgaccaccgcggtatttccgttattttataaatcagcagctgcggaaagcggtgtcagcgccgctcaatcgactgcctatctgggctataccattgcgatttcaacgtttattcttgcgatgctcggccctattttaggcacaatcgccgactatgaagggtgcaagaaaaagttcttcggtttctttgtgtcagccggtgtcgccagcaccgcgatgctcgcctttatccctagtgaacattggctgctattgttgctgttttatacggtatcggctatcggtttttccggcgccaatgtgttttatgatgcctttctcgtggacgtcacgcctgagaagcggatgaatctcgtctcggcacggggttttggcttaggatacattggaagcacgattccatttatcatcagtattgctgtcatcctgctcgcacaagcagagactattccagtgtctgtatcggccgcaagccagctgtccttcttcataacggctgcctggtgggggctgttcaccatcccaatgattaaacatgtccatcaacgctattacatcaaaaaagaacctcatattgtcatcaacagctttaagcggctcggccaaacgatgaaacggatcaggcaataccgggcacttttcctcttcttgctcgcttatttcttttatatcgacggagtcggcacgattattacgatgtcgacatcctatggatcagatttagggatcggctcctcaagccttctgatcatcctatttgtcacccaggtagtcgccgcgccgttttcgattatatacggaaaactggcagaacgcttcacggggaagaccatgctgtacgtcgggatcgtcatttatatgatcgtctgcgtgtatgcctattttatggagacaacgcttgatttctggatactggctatgcttgtcgccacctcgcaaggcggtattcaagccctaagccgttcctatttcgccaagcttgtgccaaagcgccacgccaatgaattctttggcttctacaacatttttggaaaattcgcctcaattatggggccgctgctcattgccgttaccgcccagctgaccggtaaatcctcgactgcggtgttcagcctgatcattttgtttgtgattggtattgtgattcttgcctttgttcccgaggaaaccagcacagatgtcagccagcagcaaaatgacctgcccctttaactgggagcaggtcattcatcatttattcgctttattcaccttcagctgtttccctttgacggttgtgttcttcatcactttgagaacatgagggcctttaccatttaaaatctcaacgtatgaggcgttatccatgatcgtgatgatgccgatgtcgtcagctgacacaccgtcaattttggcaatcgttcctacaaaatcaacggctctgattttctttttctttccgccgttaaaatacagcttcataatgtctttattcagctcttcgcttttgtcctttttgctttccggacggtcattcagtttagctagaaattctggtttcttccttgccacttcctcttgagaaggtgcttctattttttggatttcaaatccgatatattcttcaatgtcggctaaaaaccgtttttcgaaggccgtgacaaacgaaatggcctttcctttgttccctgcgcgtcccgttcggcccgtgcggtggacatagctttctttttcaagcggcagatcatagttgatgacaagggagatattttcaatatcaatcccgcgcgcggcgacatccgtcgccactaagtaacggtactcgccacgtttaaattcattcatgacgtcgaatcggtcttcctgaatcattccgccgtgaattttatcgcatggatatcccaagtcatccaattcatcggtcagctgattgacgtgctccttcgttcggcagaaaatgatgcagctgtcgggattctccgtcatcagcacatctttcagcaatgaaaacttattctcttctcttacttgaatcaccgcatgttcaatatttcttgtggttaggccggccgctttgacctcgatatgctcggggttttgcatatattgacggctcagcttctcgatatcctgcggaagcgtcgctgaaaacagcatcgtcgtacgctcagtcggcagatgcttgataatcgcctccacctgctcaatgaagcccatattcagcatctcatccgcttcatcaatgaccaaataagagagacgatccaacggcagcgtgcctttttcgatatgatccagaacacgtcccggcgtgccgacaacaatgtggcttttttgcttaagctcagctttttgtttatcaaaggaggattttccaaatacggctgtcgctttgatccgtttaaatcgtccgatgttcgtgatatcttcctttacttgcaccgcaagctcacgggtcggtgttaaaataagcgcctgcggcttgttttcatcccaattcgccagctcacagagaggaatcccgaacgaagccgttttcccgcttcctgtctgtgatttgacgacaagatcctttcgttcaagggcagcggggatcacactctgctgcaccttggtcggttctgtatatcccagtccttccaatgctcgtaaaatgtcatgactgatttgatagtttttaaaatgactcatgtataaactcctgtctcttgcagatgttctcattatactctaattgaccaaggcatatgtgttttgtcgaaaaatgatgtattaaaagccagcgattccctggcgttttagctcctgaacagccaatcgcgccagtgcgtcggcccccgcgcgattcgggtgcagcgtatctccatccatataaagcccgagtgttctttccggaccgatcgatgtaaagtatgccgagctgaggacatttaagtcaatgagatatgttttttcctcttcggccaaagctaaaatagaggccctgtaccatctgtttacagacgaatggatgccttcagaagtaaaatcggttgcccggccctgaggcgttgataggatgacgtccgctcctttcgcttttacctgacgaatcatatcacgcatcacctctttaaactccgcttcagattctttatgcttcggatttgtgtcattaatgccaagctgcaacataaaataatctccgggtttaatatacttcagaatcgcctcaagctgtccatcatttctgaaccctctcgcgatctgcccgccagacgccatgtttctcacttgaaaggtgtgtttatcgatatagtgaggcagcatctgcccccagcccgcctgcttgctgctgttgagcggataataattgcacaccgtcgagtcgccgccgacataaatggttcgattcgttaccggctgatcagacaatttctttattttcaaggcgctgagcgtaaaagcggtgcctgcctttccctctgtcaccagcagattcagctgcccgtcggtgacgggaatttggaacgtatcctccgcgccatcccctgtcatattgatgacctgaaacacgccctccgctgccacactggcccttgccgtattgccaagcgtcaccttcacctcataaaggccattcgggagatcaacattaaacgtgttattgcttttcgtcccatacgctaaaaactgaaccgcatcactcttcacaccagccccggatgccgccacatccctcatattctccggtgtttgaaaaccgtagccctttgaccggtcataccgatcagacgccctgacaccaatataaccaggctccatcgaaccgcttccaaagtcaaactgatacaccttcggctccgccgccttcacattctcaatcccgccaaaacacagcatcagcatcatcacaaaaaccgctgccatccattttttcatcaagactccccctctatgaaaacgaatacattaatgcatactcggtgattgtttctttatgatgactgaattaagaaaaaaattgcgttgaggaataaaaatgaggggagagtctcaagaaggggaaaatcagtgtgacttcttgtcacacttgatcacatcccaacctccgcaatagaagcttatttggttttcttcgtcatacacataataacggagtctttcccattgatcgtcagtcggtacaatctccaatgcaaccgaatcgatggattcaaggtcatccagctttgatgcactaatgttttcaaaccgcaattgaatgtcacaggtttgagcagatcgttttcattcaaacacaggaatatgaatataacgatcatcttctttcatatagaaagaaaactcgtttaatgtaaatggacctgtatcctcatcagaaagatgctgtttcaatttctcgtattgtgtgatattcaaatgaattccctctatttatatgattcaccgccaatcatataaatgtccacagcatcgtattcaaaccatatgatccgttcgcctgagtccgttaggcattggagcttcccttctgaaaaatagcttttatccggttgaggatcagtgatcagaaaaacatcatcattgatggaagctagcagaaagagaaaatctgcaatatcccggtctgcttcctgtaatatggattggaaatggaattcccttttggccagcttcgtcaccttgtaagcatgaccttcaaaatactcggacaggtcttctataaatgaaccagtcgttattacctgtatcatgattcgatcgtaggcaagccctgcccaaaaacgataaaacgactctgcatcttcaagttcgcatgccataacggtttggtcaggcttaagctcgatcatgtccaaattgccaatactgcttatagaggttatttccataaaatcttccccttatcagttggatagcgcaacgcaaatctcttgtctgacttgttcatacaagagaatgtgatgatacagatccttatcgtttttgatcatatccggaagtatgtcaggatacagctcaaaaaagcttttctccaacgaacgccgctgatgccggggtatccttttattcgccagcacataatccaaactgccagcaacaagcataaaaaactcatagatttccgcttcaaagccgtacaattcatcagggtactgcttttcttcaagctctcgctgtctttttctcagtttttgaagcacgttgatcctctcccttccgcaataatctcatttatttcgaaacagaataggcggatcattatctatcgcctccaacagctcttcaccaaacacagtgattgcacatttccacgggtctcccaaaagtccccaggagaagtcctgatgaaaaaagaaataatagtctccatttggaaatacgggaacaggccattcgccaaattcatccttaggcattgcctgatgaggactaaaggtatatccgtcatgctgccaatctagtgcgtacattacatcgttctttccagtacctaattgaaatgcttttaaaatagaagtctctaaatcacttagcactccgctcacatcattatgaccagctttactgctcatcgcgcttgagatatcaaacactcgatatggatcaggcgggatgatgtgatgacatctgcttccgggcttccattttatgatcttgttcacttctgaccagatgcggtcttgttttgtctgacttaaagcgcgccaattcatcataatctcatccctacaccttattggatatcctgcttataaacaccagaagaggccactgcgtaaacagcgtaacttgtcagtttcagctgttgaacatctaggccttcaccgttcgaatcacagcatgttatctcttccatctcttgactcacatcggcagaaatcaaataaagagacgacttaaggtctgcactgtaacaattgaacgtcccaaccaaaaaaccttcttcggatatcgcgagctgatcaaatgcttctgagtccggctctttatccgacagaatccacacccgtctcacgaccgtttcatcaaatgcggcaatgactgcatctccgtaatacagcatataaatcaagccgtttttttctgcaagtccataacaatcatctacagcaggcgcatccatttcttcaagctttctatcaatgtgtatttccttctgctgaccatctaacgtaaaacaccacacactatggccgttgggattctcatcatgataaatcccttcatcacataaaccgacccaaagctgttgtttctaatccaaaagacagcaggaaacccctgaaggcaagtgaaaaacacttttcacccttccctcttctgaaaaaacctttaccttcggctcgtacgattcgtaataaacgaagacatagccatctgcacattgttgaaagagcagaatatcactgtatgaaatctgctctttcactctaaaatcccgaacatcaccggaaggatcatagattgtaatggtgataccacctttcaacccttttccaatgtagacacgcccctgtggatcagcatggaaaaaacaatcttgggtgttctcgttgatgattttattcaattttaattttttcattggttatgctcctaggttcgaaatgaaatgataagaataaaccatttattagctattagtaacggacaacctagtttcattaatcgttttgggataaatctactttccaattcagccttaaatcatttagtgtttaattggtatgcataaaacgattgatcatcaaagcgaactgtttcagcttctatagcaatcagcattctgttcatgtcaataagaaagttagcatttgattgatactccggaattatagaatttgatagattcccgattccttctggatgataactcatctcaaatacttgccaattgtattcttccggatctattttttccaatctcatgtcgccaacatctgcactataataagcggatgccacattttgaaatgaaattttatgcgtatattcaccttcatcttcaaaaaccttaatatcaagtgagagttcttttttaaacacattaaaatctaaatgaaggacactgcaccccttatctatataatcaacccattcattaatcgtttgatacattgtcatcccctgcctctttttaaacaataacgccttgccaccaagcagaaaacaaattactccgtatattgtttgatccaatcatttaaatcatctgttgaatgcaaataagtttctgatgaatctttcaaatcaatcccacttagaaggattaacatatcccagactctatcgtcttctacttcggggtcatccgcataaacataagttccagcccaatccgacacttcttctcttgttgtttgtccatttaagacacttttgattttatttatgcattctattagatttgtctcgctcaatttgatcaccacgtattcaagtactaaatgattttttattagtatgcaaagcaccgtactgatatttagatattgaagctttttccgtaaaagatatgttccaaaaggtttccaatctaccaataaacaagctcacatccgtattccgtgtgcaatatacataaaccaaactggcacttaggctcaaccaaaataaaactatgattgagaatcccttcatcgaactcaatacactccaataagcagtcaaggtgctcgagacattttccaaaagaacaaactaacgcaccaatttcgctgctgtattgatgaaacagcagaacgtcccggtcatcgtaagcaacatatgactgagatattttccagatcagctgtttcgcttccgttttttcgagggcatcaacctcacgggtgttggctggtattgaatttgataaaaccagctcaagcaattgcctgctttgcgccagatcagcaaaacgataagtgaagcctctttctgcacaagggactagtttttctttgatttcgctcatcaataaacgtcttttattctcggcgagtttttcgatcaatcttttttgcatgagccgcattccctccgctgtcaatttctcaacttcttttaaattgattcatcattctcttgttttcgttgtcgttcatgtttagatttgttctaaaaaagcttgtatcgcttatcgatacaagctttatcttcaactgcttaaaactcacccagtgggcttttcacaaaacgctgggaacctttttggcaaatcctcttcatcccaatcaattctatatttttagattcttttgtcatacaaataagagaggatggtaacatctcttatttaatgttccatcaataaatgccccatttttatccaatgcagaaattatttataattaaggaagtttagaaggattttttgtattttcaagatttaattttaaagcggtcacaaaagactctagcttttcttcattacaattaatttcgaacaagttggagttcgacttactttctttataatcatcaaatataattttaatcttaattctgtaatttccgttttcttgatcaatactaagaaataagaatggttcaatagtctctaaactgatactgtcttgatttccttttatcatagtttcgatcccagatatcaacaccttatattcactttctaataaaacagcagaaaaatcgcgaacgacggctttcttattttccaacaattcaaatacagataaaataaatggatcatcgtccaactcttgataccttctcggtgttaattcaagttctatacaatcatcttttattttggccatatttcctcctcatttaaagtttaagtgagggtagttgtcatccccccctcgcttaaccttattaacgccttctcttagatttatttccttttccgtgtgtatggaatacgtgtttagaacccttagctcttgaacttccataagctgtgattactttaccccttttatttaaaacaactgtagctttttttccaacatatttcgttgccccattaggttgttttattacttttttagggcttcgcacagcattcagtttggcccttaaattgactccacggcctccatttcttcctatagattgattaagtccatgtcttgtatgacctgtgattttaactgccttcttcgtaaacttataggcgcgactagcacccttaaatatcttcccaggaccaaaattagaagcagctgcccaagcagcacctttccatcctttacctgatttatatgccttatatccatcataggctgcaaatccggcatttaccacaagccatacccaatgcccgtccggatcaacattcatcactgggttattatttccataagcatacccattctgatccaatgaatctccgtcgctgcccgggtctgggtcgagcgataggaacacgccgtttcttggctcgtagtagcgggccatgagatagtacaggccggtttcttcgtcgtattggtagcctgcgtagcggtagcgattgtcttttacttcgtcgcttgcttcggtttttgttggatttccccatgcgtcgtattgatacttggcaacggtttttccagtgctgtctgagatcgcgatgatgtcgccgtgagcgttgtagtgatagaaatatttcttaccattttctgtgtaggataacagctggccgctgtctccgtacgtgtatgattttgtgacgttgttgtccgcgtctgtttcatacaagacgttcaagctgtctccgtcgtagaagtagttcgtgacttttccgttgacggttttttggattctgtttcctttttcgtcatacttatatgttgcgaatggcttgtcttcgccttttttggtaacggcggtcaggttatcttctgcatcccacgtatatgtgaatttgccgtcggatgtgcggttgccgtttttatcgtaagagatgctttcatcattgacttttgtcagctggttcatgatgttgaaggaagcgttcaccgttttgcttgagccgtcttttatagttgtaacggttttccggtttccgaatccatcatatgtgtattcaataacagtaccgtcttcatgggtttctttgacaagctgattcagcttcccatactcatattgcaccttgccgcttgctgagctgtttatcgttgtgcggttgccgttggcatcatattcatagctttccgtcagaatgtctccgccgtttttgtcaccgatatgcagcgagcttacaaggtttctttcgtcatatgaaaaacttgttccgccgccgttgcccgtaataaaggtttggacgtttccattttcatcataatcaaatgaatatgaggatgtactgtctttcatctcaatcatttgatccagcttgttatacgtaaattgattcgttcctttttggtccccatgaatccacgagaaggttttcagcttatcggagtcactaggatatgtccaagtttggctgccgccgcggtctgtcagttcggttaaacggtttttgttgtcaaatgtccgtttctttgtggtgttctgctctttattgacgaccgacgtttcatttccatttttgtcatacgtgaaaatgtacttttctgtaccgttatacgactttgatttcacccggtctgttccatcataagaaagagacacttcgttgccatttggtgaaatggttttggtcaggttgctgttggcatcatattcgcttgctaacacattgccgagagggtcagttgttttgacaagcttgcccatgacatcatattcgaatttataggtttgatctgctcctgcccggatggttttgcttacctcattgccttccttatcatagctgtgaaggatagacgtgccgttagagagcgtcatgtttgtcaattggtctgcctgatcatacgtataggttgttttttcaccttttgcatctgtttcagacgttttcttaccagtttcatcgtaatcagttgaagtggcgtaacctagttcgtcctcttccttggtcacatagttgccattactgtcatacgtgcttttagtcagaaggcttccttcaatcaaacggatatcatcaaaccagactgtgcctgtcgcactcttttggaacagaatactgatatcgactttattgatcggctttgttttagggatgacgacagctgctcggttccattcctgtgttccagaagggaatttcgcattgtagatgcctgtgctgccgtcagcgtaagtgacattcgcctgcagagaatagtctttttcatctgtaaatttgacgctgcttgctttcgacattcctgtcagtgtgagataaaccggtttgtcatttgcgctttgccctaagacaacggtttgttttgttactgatccggcttgggacgcactggtccgggcagcttttaatgatacatcatcattaaagccttcttcagaatcaacggatgctccgcttacattccagttttccgttgctgatgtgaagctgctgttttgaactgggttatagcttgatgatacttcgcctttttccagctggacttcatcaaaccatgcttttcctttgccatctttatctttatgatcgacttccatatacacaacagctttgcctgcattcgctggagtcgtaaaagtgatttgccgttttgtccagtcattttttccggctaatgcactgtattcattgtgaatccattgaattcgtttttgatctttgtctcgcaaatcaatgttaaaataggctcttgatttcgcaagatctgttttgattttcccgcttaatgtataggttgtattcggctccagctcaactgtttgtgttgctgacgaatacccatgatctgttccggcagacgttgattggctcaagacctccaatgcctttgatccggaaagaactccgcttttatcggcgatgactgaaattttgccgctgtctttagaggcagtcagattccagccggatttttgagcttcaaagcttccatctttcaaaatattagttgaagctgataaatctttgctcgattgaatctggtttccatatttatcataaacagctgctgacgatgattttccgctctgatcggtttcggatacagcatccagtccgtcataagcaatatccgtgacattgccctcggtatccttcatctttgtgacatcgttgtttttgttgtattcgtatgtctcagttccatatgcatctttaaccgacgtaacgttgccatctttgtcatattgatagctttccgttgcttttccggtgccgacgtcatttggatctacatcttctacaacattgttgccttcatactttgtattcgttgtaatttttaacccttccgcatcatcaatgacctgaatcggatttcccgcttcattatagccatactgtactttccggccatttggctgtgtcatgagaagcgtctttttatcagcatcatagctgtagacatatgtttcttttttagcgttgatcgctttttcgagacggtgaccgctatactgatattcggtaaagacaggctttgcttcggtactgttagctgaatattgtttgacaaggcgcccttcactatcgtagtcatagcttgtgacagtcccgtctgtatctgtaaccttcttcagcaaatcattctcatatgagtaggtgactttcttattcttaggtcctgtgatggacgtcacatggccgttttcatcataggtaaatgtaagcttgcggcctgatgcatctgtaatggcggtcagttgatttttgtcattgtaagtatagacagttgcattgttatggccatccactaccttttggagtttgccgccttttttattgaaataagcgttggtttgatcctttgtttttaatatgaactgatcagctgtttctgttaattcaagatatacaccggtcggcggctgatacgtgccatcggcttttttcgtgaatcgatgtgtcgtagcgtcttcatcgatatacattgccccgccatccgttgagatgacagatgtttctgcatcagcataccagccttgtccaaataagtgatcagagctgtcaagactgttgtaggttctcgataagccaagtcccggaccgcgtccatcaattgacaaatcttcttcattcacaatgacattgcctgtcgcaccatttaactggccgcttgggatatcaatgatagaccagtactcttctgtacctaggaattctgcgccttcatggaacgttgggttaaagggcgccgttggaatcgtttcaccattcgcatcataggcgacaagcgtgaaagaataattcttcttccctttgtaattcccatttgcattgttatagacaggtgatggatcgagggctaattccccgccttttccatctgtatgaagcttatagcttccggctttgatttcctcagaagtcggccagatgtttttattttgggttgtccaatgatcagcatcaccaacatcaaaggactgatattctttaccgttgtaaatgttaactttatagcccttcgcattttgaaccttttcccatatcaaattcacataacccgtttgactcgattttgtatttgtatacaaatagccagttacattctttggcctagcgatatcaggaagtgccggggtagcagccggggatgcaatggcttcgccgtctttgttgtatgcgataattttaaacgagtaatttcttttggctccatctcccccggcgtttttataggttggtccgggattgatcggcagctctgctccgcttccgtcctttaggtgaagagcatattttcccgccttgatttctgcacttgtcggccagatctttttcccttttgtggtccaagacgtctgatttccgagatcaagtgtctcaaagcctttcccattgaacacctgaaccttatagccggttgcaccggatacagctttccaagaaaggtcgaagtatcctgtggcattcccattattgtagccctttgctgacggtgcttgtgcttttcctacattagggataacgggctttgccggtgcggacatcgctccttcaccttggtcaaatatcgcactgacgccaatccaatagtttttgcttgtagcatagcttccgccggaattcttatagaccggggatggatctaatgccaattcagctccatccttgccgtccagatgcagtttatatctcttggaggcaatttctgcgctcgtaggccagatttttttaccttttgtgctccacgacgtgacgttgcctgcagaaatcgcttgatattccttaccattgtaaatccataccttatatccttttgcgccttcaacctttttccagctgatatcgaaataaccagtggaatcgccgttgtgataggctttgattgtaggtgtgtttccctttggaatggtatacgtcacttcaatatatggtttattggcggagttcgctgaagaaattagttttttccaatattccttgccgtttccgtttgtatgaagcttaaatccatagttggccccgccggagttccatgactttacagcagcggtcacatcataactcgcccactgtcctttatggacgtcggcttttccgatatttttagatgccggtttggtgttccatgtcacttttgcattatcataattgctgttgaccgtatccagccaaaggccggttgcctttgttccataataggaatgggctacgtatgtttttaatgtagctttagtgacagtcatattttgaattggctttaggttgttaaatttcatgaacgcatagtttgtgcctgttgttttgtcataatagcccgttttcagtacataggcctttaaattagcatcccatttttgtgaggaggccgaatagttcgtcgtcgggtaggcactcatgacaaacgtatccgatgaaacagataaagaagttgacgggtcgatagatactggatatacgcgttctgggtctttcagccagttctcgtctgccgtaagatgaagcaaatacccttcttcattcttttccagcttatagctgactttgtctgaccgttcaacctcgccggaaagctcatctagttttgaatccgtcataaaaggcttaggcacagaaaaaacaacttttcctttttcatcagaaaaatcaatggatccatcctcttgttctttagcctgcaaatcggtttttaactgaaatgtaaatgtgttgtatccattatactgatgaaggactaaatcttcttttatgttttcattgaatgtgaaagtctgaagatcaatattcggaaacacatccggatacacaatctcattactgtcagtcttataatctgctgaggtatctttcggagtaagtgaagttttattcgggcctttcgcttctgctagtgaatatgtaaccttatggtcattatgctcaaaagtcgcataaagcccgttcttcatttgcttttgaaaatctgaattcaaaatagcgttctctgtctcgacttgtttgcttgtcgactcttttaactcaggagaaatgtcttcccagtcggcatccggtgtttcctttgtatgaataggatcaaggtatacttcctgtttatagacaccgtcaccttcataatagagttttgtattttctgttctttcagaggtgatctcaccctctttgtttatatcttttggatcaaaaggtacagcttcctcagtttgttctttctgaagagtttcttctggatcatcggcagcaatacggtttccattctcttcttctgtagattttgctagtacatcggctggcactaatgaaatcattaaagccaacactaaaaatgctgcaatgaaccttttaaagtttcgcctctttctttttttcatttcctctctccttttgtaataaaagtaatatttactcaataatcttaactagactgaaatatcattacaatatttttctagaaaatttatcttattttaaggattagcgagagtcaattgacctaaaacaaaaaaaggccgcataggcctttttacattttttattgtatttgttcaatatccgtaccctcagctgtcacattcgccttcccctgcctcctgacaagcgtcaaggccatgcccgcaaagatcattacgatgccaagcgtttgatagaggtcagggcggaagcctgtgaagacggtatcgagcacgatcgcgacagcggggtcgagaaatacaatgattgaaataaatttcgttgataaaaatcgtaaactgtcaaaaaacagcaaatatacaatacccgtatggatgatgccggtagataccaccataatccagtttccctgagataggtccgcaaaagcgccaaagtgaataaacggaatcaggatgataacccctaaacctgtctgcaagaaggtggtcgtgtaaggactgagattgtgaatgccttttcccaataaagtggtgaacgcataaaacagtgcggcgagaactgcccatatgatccctgatcccatcagctgtgtcaatgatgtgctgccgttaatcccggaaatcagcgcagtcccaagaaagcagatgataatggagctgacggagatcacatttaatttctctctgtagaagaagctccccagaagaagaacaagcaccggcgctagatgataaacagagatggcaattgtaacggacgtttcttcaaaagacttaaataagaacacccagttgaatacaagaaagaaaccgcacgccaatgtttgcagcacgtctctcttgctccatttttcagttttatactggccggacgccagccagcaaaagcctaaaaacagcgtcgcgcaaaggcagcggacaaagaccaattcaaatgacggcagattggtatgctctgagaaaaagccgatggagccgaaaatcaccatagagatgaccattttgattacggctgttgatttttgttttgacgatatggaaggatcctgttgcatcaaacgtattctacctccaatactgcatagcataaactgttttttgtgaattcagaaatctacacatagaattcctcttttttacatgtagatattataacacttctattctaaataaaaaaaagcgcccaagggcgctttttttacaaatctatcgaacaatcaaaaccgggcatgttgataattgagacactttatggctgacgcttccaagcatcatttctttcaggccgctgatcccccggctgccaactacaatcaggctgacgcctttctcttttgcgtgatttagtatctcatgcgccggctcgccattcgcgtaaatggtttcagcttgaacgcctttttcggctgctttttcttttgcattctcaaggattttcaggccctcttttttaacctcgttcctgatttcatcaataaagtgttcaggcacatagacaattcccgtcagagaagaagtcgtgacgacggcttctctccccacatgaagaatgcttagttccgcttgttgctcttttgccaaatgcactgcggcatcaagcgcttttgcactcatgtctgatccgtcaatcgctactaacattttgttaaacatgctcttcccgcctttcggactgtgggtggttcatctttctcttttattgtccgcctgcatttcgttattgtcaattgaagcgcatgagttttcaaaaaattgtcagagactctctccgtttgtggcgataacctgctgataccagttgaagctttttttcttgatgcggttaaatgttccatttccttcattgtcccggtctacataaatgaagccgtagcgctttttcatttccgcagtagatgcgctgacaaggtcaattggcccccatgatgtgtatccgattaattcaacgccgtccgcaatggcttcgcgcgcttcaattaaatgatcacgcagatagttgattctgtaatcgtcctgaatcgtgccgtcctcttcaaccttgtctacagcgccaaggccgttttcaacgatgaacagcggcttctggtaacggtcgtataaggtgttgagcgtgatgcgcaagcctttcggatcaatctgccagccccattctgatgatttgaggtaagggtttttgactccgcccagcaggttgccccctgattttgcaagctcttccggatctgtgctcgccgccatcgacatgtagtagctaaatccaatataatccaccgtatgttctttcaagagctcttcatcgccttcagccatttcaatttcaatattgttttctgccagatagcgtttcatatatcccgggtatgcgcctcttgcctgaacatctgagaagaaaagtgttttgcgctcattctccattgccgcgaagacatcctccggcttagaagtcatcggataggttgtcgttgccgctatcatacagccgattttcgaatcaggaatgatgtcgtgacccgctttgacagcaagagcactggccacaaattggtggtgtgccgcctggtacatcgcgtttaatttgttttctccttcttcaaaaacaagaccgcctccggtaaatggcgcatggagcactacgttaatttcattaaacgtcatccaatacttcactttgtgttgatagcgtttgaaaaccgttttggcatagcgttcataaaactctatgactttgcgattcttccagccgccataatttttcactaaaccgagcggcatctcataatgagagatggttacgacaggctcaatatgatgctttaacagctcatcaaacagatcatcataaaatctgaggccttcttcattgggctcctcttcatcgccattcggaaaaattctcgtccacgcaatcgatgtgcggaacgccttaaatcccatttctgcaaataaggcgatatcctctttataacgatgataaaagtcaatcccgttgtgatacagattcaaggaagtcattgattcatcaaatggagacatgatcccgttcggcgatacgtcagctgtcgaaagccccttaccaccctcgttataagcaccctccacttggttggcagcaactgcgccgccccataaaaatccttctggaaatcgtttttcatttgaactcatattgatcaccccattagttttttcaagataaagcaagcagcgcttcttttggctgcactttaccgatctctttcaccggcgaaaacgaatattggtctgtgttggtcacaatcaccggggtaatgacgtcatatcccgcggctttgatttgctccagatcaaaggacacgagcggatctcccggtgcgaccttgtcgccttctttgatgtgagccgtgaaccattgtccctccagctttaccgtgtccaatccaatgtgtatgagtatttcagctccctgatcactcgtaatgccaattgcgtgttttgttttaaaaatggtggtaacgcttccacgaacaggcgaaacaacttctccttcttcaggctcaatggcaaatccttttcccatgaccccagcagaaaacactccgtctttgacttcacttaaggctttcacttctcccttaatcgggctgtgaatgatctctctgctgccttcatgcactgccggctgctggctgccgtcagaaggcacatcctcgaatccaagcaaatacgcagctgctgttcccgccgcaaacgcaatcacaaggccgatcatcgcgtaaataaacgttgggccgataaagacagggatgctcggcagacctgcattccccccgacgatataggaagcaacacccgtcatgccgtaaaacgcgccaccggctgcaccgccaatcaaagcggccgcaaacggctttttcaatcgcatattcacgccgtacatcgcaggttctgtgatccccatcagcgccgtgatgcttgtggtaagcgcgagtgatttaaattttttgtttctagagcgaaggaagacggcaaatgatgctcccgcctgccccatattcgccaaaaacatagccggcagtaaataatcgtggccgttttgagcgatgttgttgatcatgatcggcacaaaggcatagtgcatgcccgtcataatgattaaagagaatgtacccgccagcaaaatcattgccacaagccctgcatgatcaaacaaataattgaccccagaagacaagtattctcctaaaatagcgccaagcggaccgactgtaatcaatgtcagcggcacgacaatcaatagcgtgaatgtcggaaccacaatcaatttgagagatgcgtgtgtaaaacggtcaatccatttttccacgtatgaagcaatccaaatcgacagcaaaatcgggatgaccgttgacgaataagtggcagcggttacaggaagcccgataaaggaaatcggtttccccgcaccgagcagggctgtcaaatccggatgcaggatcgccgccgcaatggcagccgctacgtacggattgcttccgaattttctcgccgcactcatcgctagcaggagcggcaggaagtagaacgcaccgtcaccgacagccgtcaaaatgacatgaacctggctcttctccgccatccagccaaacgtgactgccagcgccacaagtcctttgatcatccccgctcccgcaatcgcaggcagaataggggtaaacaccccagaaatcacatcaaagaccgcactcagcacattctttttctgagaggatgaaccagcgctcttttcatcactgagattgctgtgccgcacaatcgcctgatacaccttcggcacatcgtttccgataatgatttgaaactgctcgccgctgatattggtgcccatcactccaggcagctgctccagctgactgcgatccgccttcgcgttgtcatgaagattaaaacgcagcctcgtcatgcagtggatcacgcgctgaacgttttcttcaccgcctacgagttgtaatatgtccttcgataatttatcataatccatgtgtatacctcctttttatggggggactgctggatgaaaggtggccgcctttcaccagctttttttgtatcaaatgctgcatcacctcctaaaagagaataaaaaaacctaaatgacacagattgcgagagtctcctcctgcacctgcaccatttaggttttgcctgctttcgcagtaacaatcctgacgggtcgttttatttgtttgtaggtatactttagcactagattcgtgagatgtcaacgctttcatttttggtgttgactatcgtttctagaacaaaagtaatcataaagatttgaacttagtattaacttcaataaaaaattattgtaattaaaaaccttgaaaggcattttttccaatcaaggttatgaatcgttaccgtttaaatttttttaaagacttctttatctgtactattacattctttagccaatctattggttctaaattaaacgcaggaagatacacgccatctgcgcaagattgaatgtaatcgtttttcttattgtctgaatgctcactttcaataaaatccgttaaaaagacaatagcatcctccaaatattccttactttcctctattaataactcttgtatagcgtcatcaggagtttcaatatcttgatggaatgttccagctaaaaactgaaaaacagggtccttctgtttattgatcaataacatgtcatcttgctcctttaagggagaggtaacgggataatgttaaaatcattcatcatctaataaatcaagataatactgatcattctcttctatttttcttaagaactcggtaagagaagttgcaatttgaatatcataatagtaaatcggatttttattattatcatttaattcaattgacattaatgccgattcactaccttcaaaaaatattaatttatcattctcaaactcatcatatatttctatgtcaggataaaattcaaagtcatttatcctcaatcgaaagtctcttacagaatatggatccaaaatgcgattagtattaaactctgatcctttaataaacccatagccaacttctaaataaaaattcactaattcactaggtaattttaagtttaaatttttttcaacctcttcaatctcactttgattcactggataaaaatcattttctttgtttgattttataaaattataactcatttttttttgcctcctttaaataattcatttgctggtgagcctgtaccatgaatcccagcttgatgctcgttaggaaattttgctggatgcatattccaccattcatgttctccgccaaaagtattttcaattatatggtgagcatcatacttatcccctttttttctaataattttacctgttttttcagatacaacattttccttataaacaggccatttttgtccagtgttttcttcccattcttttataactttattttttactttatcaaatttagtcctgtgttttgcagtctctattggtgacatttttttatattctttatttcttaatgcttcctttaatttatctatttgatttttaggtaattctctacctgtgcgttgttctatatctctagcatacttttttattaaatcagaattaattttattagcagatccacttacatcattcgcaattttccctttatccttagcaacgtttttaacttccgaagccttcttagcctttttcccattattaataagtttattaatatctattaacttttctaacttagctattttggcaaatggtactgagtttatggaggcaacaacacggtctttccctgtgactttttcgcctgataccggatctctgcccgtggctgctttaaatagatcatacacgccggtaagttctacagccgtctctaaaattttcacatatccattctcatccactttaatgtccgaaagcgagacgacaggttcaagcttcatgtcattaccagatatgtatacattgtaaagtgtatcattataaacgacttgcttaacctctgcatttgagaaatcagtttttatatgttctctatgttcactcgtattatacactttaccattgataacgatgatatttttacttacctttttagaatcacccgttttgacaactgaatccactttagacttttcattctcggctaatttcttcagcatcatctccatcggtgaatcatccgcctgcttcatttgcgggttaatcgcgccgaagatttggttgatgttttcttcttcctgtgatttcaggatggagccgcttttgtagcctgtgatttcaattttcgggccggtgtacatggtttcgagctgatcaatgtattttttcatcgtttgaaaatctgattttgcggcttctagtgcttgggtttgctggccgtcaaattgaaagagcttattcagggtgtctgaaatcagccgctcagcctgttctgtttccatccgaaaaaaggaatcattgactgtcggcaggctgacgatgtgatctatggctgatgtctggcgattgactgcgtcagtgagctgctctgtcacttctcgtgcatgcttgaccccatgtctcgcatcgtgtgagagaaaagcctctgcgatcatgccgtgggagttagattctacagaggaaatcgcatgctgtgtttgtttcagcacttttttgtattcgtcgataaatatgccaaagaaaaggagaaaaggcttgtggcactcctcgtaaaaggtccggatggcatctccgccttttcctttcagcgcatccttcatgcctgccagatgctcaacgcttttttccagcttctccagctgttgtttttgcttgtccagtttctcaatcgtatgctgaatgccctcgtgaagagcgtggacatctaatgttttcaatcccttgtcctcccgcgctttatttcatggaagatgatatgttttcgtccgtttccttcatggcgtttaccgcgctttccgtttgtgcgatatgcttggccagaacagacgcatatgcttcagtgagctctttgatgtccttatttaattgctcgatggacttcacaacattcaaatggtttctgcctgagagatgaccgggcaatgaggacttgagttcagctgaattcttgagctgagaaagcccttgcttcactgtgtcatacaccattttaatttcctgtgccatttgtgctcacctcactttttatgtttttccttctctatttcatgctctatcctcgtgatttggcgtcttatagaatacacatcgccctctaatgagtggatttttccttctatgctttcgatgattccgctgacttgatcgcttttgatttgctgatatgctttgttcattccttcacgaatatcttcaaaccgctcagcatgtgttcctctccatgcctcccggttaagatgaggccggtgaatgagatgctgggcctcagagaaatcgtgtttgatttgcctaatttcgtgcagcactcgttttaattgatggatctgttcctgcttttcatgtaagtcggcttttaccgaatgtaacaacatttcactatgcatgccgcaacacctcgtgtttctatcaaactgtgtaaattctttacaatacagactattttcatattacatgatgggtcatattggataaataggtaaaaaggattgtcttgagaggtatagaactggttctaaattgctaaaaatacgatctcatcaccctatgaaaggagaaaacaatcatagtagggactttttatttaagcctttaatctctcctccagttctaatttttcctcccacttaactgtttcttatagtcaataaagctcataaaaaaacaccttccctcgaaggcgcttctccatcttatttagatccccatacagcctcaccgctggtattcagcacactaaacgtcatgacgttcttctctctcaccgaatcccactggcgtaaaaataccccgttatacttcttgcctgctaacgtgatgtcggcggtgttttttccggttttcctccatgttccggtcatttccccggaaatggtgtggtttttgttgagctggatgttgatggtttgtttgatgtcggctgagatgtcttttccgtgctggataagtttgtatgttcctgtgatgtctttttgttttacttctttcaatgtttcgcccgcataacgatatggtgctgctaccggccagccgtctttgttcatgaacaattggtggactctgacttcgtgttcttcacccctgcccgggaagcgggtgtggaagattaaataggaacgcccggttttttcatcatagtatgcggagttgtggcctggtgagacgtacccggtgcctttttcattttctgtttcaaaagtgtagctgcccatgagtttgacgccgtatggttcgatggaacggtcgtcgaagaatgtgcctcccttgccgcggacgtcgagcattggattgccttctgcatcatagtaagggccgtccggtttcttggagcgggccacacggatgttgtagccgcctgttgcatcgagaccgccatatgataggtataagtagtagtattgggtgtctggattgtagagaacatacgggccttcgattctgctgtggttgccgccgagcagttttttcccatatccctgtccaggaagcgggaagcccgttttcggattcatttcaagtatgaaaatgccgcctgagtatgatccgtacaccatccacagcttgccgtctttatcaaagaaggtatgcgggtcgacgacattcggatgtttggttgcatcatacggtgttccatcgctgcttgtgccttccattcctgatttcaaaaagatgcctttgtttttgtatgggccttcgatgttgtcagcaacggcaacacccatggcggatcttggcgaatcgccgcggcaggcgttgtagtacatgtagtatttgccgtccgccagctgcgtgacgtcagccgcccaaagagtatcggattgcgcccattcgaaggtttcttttaattcttcatagacattcgggataagtgggttgtcattgcttacgctggtggtcagctgctgccattgcatgaggtcattcgatttagctgaagcgagatgagatccaaaaacataaaaagtgccgtttgtttcaatgatggaagggtcatggacgctgacttctttaaatataggtttttgtgcatagacggagtttgggagggtgaaggccatgataagagctgcaagaaaacatacacggaacaatcggttgaacatctaaacaattcgcctctcttttttattaaattttaaacgcttacatttctctatgaagataccccggcctattaaaacagccgaatgttttcatattcatccagataggtgatttctcacttcacttacatagtcagactgatgtctgtctgttttgcgcagaacttgttgcttgcatatcctctccttcatagttcaactcttttgctgtttctccttcttgcatcacgtctgtttttctttcgcgtacatgtaataactgctttgtcaggttttgcatcaactgtgatacagccatttcgttgtcggcgttttttaagatgatgcctgattgcccgtcaacaccagagtcattcggctggctctttataaaacgccttgcgaaaaatacgacttagtaaacgcatattgagagttagacagcggcgcttgcctccttgtctggatatcgtgtgcaatcgctgaaaaaacctgttctgctttctgcgtcacgctattacaatagcaatctaacttgttaaagactataaaaaaccttttgacttctgctgctgaaccaattaatataatactcagttaatagttatcagaatttttaggaattgagtgattcatatgacactgcataaagagcgtcggatcggccggctgtctgttctcctgctgctgaatgaggcggaagaaagtacgcaggttgaggagctggagcgagacggatggaaggtctgtcttggcaaggtaggatcaatggacgcacataaagtagtagccgcaattgaaaccgcttccaaaaagagcggtgtcattcaatctgagggttatcgggagtcacatgcgctttatcatgcgacgatggaggctttgcatggcgtgaccagaggtgaaatgctgctgggatcgctgcttcggacggtgggattgaggtttgccgttttgaggggaaatccttatgaaagtgaagcggaaggcgattggatcgctgtctcgctttacggaacaatcggggcgccgattaaaggtcttgagcatgaaacattcggcgttggaattaatcacatatgaaacagcccatagatcttagacgatagggggctatgcgtgaaaacagaagttcacagcatagctcctttttgtatgggcgctttaccaaagtaaagaaaaaggagttgggcttatggtgactttagacggttcttcattgacaacagccgacgtcgctcgtgtgctgtttgattttgaggaggcagcggcttctgaggaaagtatggagcgcgtgaaaaaaagcagagcagcagtggaacggattgtacgcgacgaaaagacaatctacggcatcaacaccggatttggcaaattcagcgatgtcctgattcagaaagaagactcggcggcgctgcagctgaatttaatcctttctcatgcctgcggagtcggcgacccttttcctgagtgtgtttccagggcaatgctgcttttgcgcgccaatgcgctgttaaaaggcttttccggtgtacgcgctgagctgatcgagcagttgcttgcttttttaaataaacgcgtccatcctgtcatccctcagcaaggatcacttggcgcaagcggagatctggcgccgctttcccacttggcgcttgcgctgatcggacaaggagaagtcttttttgagggggaaagaatgccggcaatgacaggcttgaaaaaagcaggtattcaaccggtaacgctgacatccaaggaagggcttgccttgattaacgggactcaggccatgactgcaatgggggtggtcgcctacatcgaagctgagaaactagcctatcaaacagaacgaattgccagcttaacgattgaggggttgcagggaattatcgatgcatttgacgaggatattcacttagcccgcggctatcaggagcagatcgatgtcgcagaacgaattcgcttttatctatctgacagcggcctgacaacctcccagggagaactgcgggtacaggatgcctattcattgcgctgtattccgcaagtacacggtgcgacttggcagacactaggatatgtcaaagaaaaattagagattgaaatgaacgcagctacagacaatccactcattttcaatgacggtgacaaagtgatttccggcggaaactttcacggacagccaatcgcctttgccatggattttctgaaaatcgcaatatcagagcttgcgaatatcgcagagcgtaggatcgaacgacttgtgaatccgcagctgaatgacctgccgccgttcctgagccctcatcccggtctgcaatccggtgcaatgatcatgcagtacgccgcggcctcactcgtttctgaaaataaaacactggcccatcctgcaagtgtggattccattccgtcatccgccaaccaagaggaccatgtcagcatgggaaccatcgccgctcggcatgcttatcaggtgatcgcaaatacaaggagagtcattgcgatcgaagccatttgcgcattgcaggctgttgaatacagaggcatagaacatgcagcgtcctatacgaaacagctttttcaagaaatgagaaaagtcgtgccgtccattcagcaggaccgtgttttttcctatgacattgaacgcttgactgactggctgaagaaagaatctttaatacctgatcatcagaataaagaactaagggggatgaacatatgactgatgtaaaaaaatcaatccgtgccaacagaggaacagagcttgaatgcttaggatgggagcaagaggcagtgcttcggatgcttcgaaacaaccttgatccagaagtcgccgagaagccggaggacctcatcgtatatggcgggattggcaaagccgcacgggattgggacgcttttcacgccattgagcattccttgaaaacattaaaaaatgatgaaacattgctcgtgcaatccggaaagcccgttggcatgttccgtacacacccgcaggcccctcgcgtgctcctagcaaattctgttcttgttccgaagtgggcagactgggagcatttccacgaacttgagaaaaaagggttaatgatgtacggacagatgacggctggcagctggatttacattggctcacaaggcatattgcaaggaacctatgaaaccttcgctgagctggcgcgacagcacttcgggggcagcttaaaaggaacgttgacgctgacagcgggtctcggcggaatgggaggcgcccagccgctgtcagtcacgatgaatgaaggcgtcgtgattgccgtcgaggttgacgagaaacgcatcgacaagcggatcgaaacaaaatactgcgatcgaaaaacagcatcgattgaggaagccttagcttgggctgaagaggcaaagctggcaggaaaacctttgtccattgcacttctcggaaacgcagctgaggtgcatcacacacttttgaaccgaggcgtcaaaattgatattgtgacagatcagacatctgcccatgaccctttaatcggttatgttcccgagggctattcccttgatgaagctgaccgtttgcgtcaagacactccagagctttacgtgcgccttgcgaagcaaagcatgaaaaaacatgtcgaagccatgctggcctttcagcaaaagggctctattgtatttgactacggcaacaatatccggcaagtcgcaaaggatgaagggctggagaatgccttcgattttccggggtttgtccctgcctacatccgccccttattctgtgaaggaaaagggccgttccgctgggcggcgctttccggagatccggcagatatttaccgtacggatgcgttattaaaagagctgttcccgacaaataaagcccttcaccgctggattgatatggcacaggaaaaagtcaccttccaaggcttgccgtcccgtatctgctggcttggatatggagaacgaaaaaagatgggcctcgccattaacgagctggttagaaccggggagctaaaagcgcctgtcgttattgggagagatcatttggactgcgggtctgtcgcctctccaaaccgggaaacagaagcgatgaaggatggaagtgacgctgtcggtgattgggctgtgctaaatgcgcttgtcaacacggcggcgggtgcaagctgggtttccttccaccatggcggcggcgtcggaatgggctattcccttcatgccggcatggttgcagtggccgatggaagtgagctggctgacgagcggctcgcgcgggtcttaacgagcgacccaggaatgggcattatccgtcatgcggatgcgggttatgaacgtgccgttgaagtagcgaaggaacaggacattatcgtgccgatgcaaaaataaaggagtgatgacatgccaaagcaaattgatacgattctcatcaacatcggtcagcttttgacgatggaaagcagcggtccgcgggcaggcaaaagcatgcaggatcttcatgtgatcgaagacgctgttgtcggcatccatgaacagaaaattgtgttcgccggacaaaaaggggctgaagccggttacgaggcagacgaaatcattgactgttcgggacgccttgtaacgcctggcctcgttgatccgcacacccatcttgtatttggcggatctcgtgaaaaggagatgaaccttaagcttcagggcatttcatatttggatattctggcgcagggcggcgggattctgtctacagtcaaggataccagggcggcttcagaagaagagctgctgcaaaaagcccattttcatctgcaaagaatgctgtcctacggcacaaccacagcagaagtgaaaagcggctacggcttggaaaaagagacagagctcaaacagttgcgtgtcgcaaagaaactgcatgaaagccagcctgttgaccttgtttccacatttatgggagcccatgcgattcctcccgaatatcaaaacgatccagatgattttctggatcaaatgctttcccttttgccggaaatcaaagagcaggagctcgccagctttgctgatatttttacagaaacaggcgtttttacagtcagccaatcccgccgttatttacaaaaagcagctgaggcaggcttcggattaaaaatacacgcagatgaaatcgatccgcttggaggtgctgaattagcaggtaagctaaaggccgtctcagccgaccatttggtaggtacatcggacgaaggcataaagaaattggctgaggcaggaacgatcgccgtcctcttgccgggcacgacattttatcttggcaaaagcacatacgccagggcaagagctatgattgatgaaggtgtatgtgtcagcttggcaacggattttaatcctggcagctcgccgactgaaaatatccagctgattatgtccattgccgcgcttcatctgaaaatgactgcagaagaaatatggcacgcggtcacagtcaatgccgcatatgccataggaaaaggagaagaagccggtcagctcaaagctggccgctcagctgatcttgtcatttggcaagccccgaactatatgtatattccgtatcactacggggtcaatcatgtacatcaagtcatgaaaaatggaacaattgttgtcaacagggagggagccattcttggataagtacccttttctcagagaggccggatcttcgtttaaagaccgggatgtcacaaaaatgagcgacctgatcgcaacatgggacggccaggacattaagggaccggcgttgataggtgtccccctatcaaaatcctccatcagtcattcaggcgcttcctttgcacccggaacaatacgccaggctctgaaacattcatcagcctattctgctgagcttggagagcacgtcgtatcagagcttctatatgacctgggggatatcgatattcatgtcactgatatcgtaaagtcacatcatcacattttccaaaccatgcacgctctgctttcggatcatccggattgggtgccgctcatacttgggggagataactctatcagctactccacaataaaagcgatagcacaaacaaaaggaacgacagcggtgattcaatttgatgcccatcacgatgttcgcaatacggaggacggggggccgacaaacggcacccccttccgccgccttttggatgaagagatcattgaaggtcaacatttgatccagctgggtatcagagaattcagcaacagccaggcctatgaagcatatgcaaaaaaacataacgtgaacattcacacgatggacatgatccgggaaaaaggactaatcccaacgataaaagagattttgcctgttgttcaagataaaacagatttcatttttatatctgttgacatggatgtcttagaccagtcccatgcacccggctgtccagcgattggcccgggcggcctctatacagacgaattgcttgaagcagtcaagtacatcgcacaacagcccaatgttgccgggattgaaattgttgaagtcgaccctaccctcgattttcgagatatgacaagcagagctgcagctcatgttctgttacacgcattaaaaggaatgaaactctccccattcaagtgatcttctggcaggttgtattttgggtataagaaactcatctgcctaaggaatggcagctaaaaggagggcgagacagtgaatcttcaggagaacagcagccaacagctaaaacgcacaatgaaaagcaggcacctatttatgatctcattgggaggcgtcataggcacaggacttttcctcagtacgggctatacgctacatcaagccggacccggcggtacgatactcgcttatgtaatcggcgggttgatgatgtacctcgtcatgcaatgtctcggcgaattgtcggttgccatgccggtgaccggctcttttcaaaaatatgctacaacatttatcggtccatctaccggttttatggtcggcatcatgtactggatcaattgggtggtgacggtaggctctgagtttaccgcatccggtattctcatgcagcgctggttccctgacagcagtgtatggatgtggagtgcgatttttgcagcccttctttttatatgcaacgcattttcagttaagttatttgcggaaactgaattttggttttccagcgtaaagattgtcaccattattttatttatcattttaggaggagccgccatgtttggcctgatctctttaaacggaacggcggatgctcctatgttgtcaaacttcacagatcatggcgggttgtttccaaatggctttctcgccgtttttatcgcgatgatatctgtgagcttcgccttttccggtacagagttaatcggcgttacagcaggagaatcagcaaatcctcaaaaggatataccgcgatccatccgtaatgtcgcatggagaaccgtgatttttttcattggcgctgtcttcatattatccgggttgatttcatggaaggacgcaggcgtgattgaaagcccgtttgtcgccgtatttgcggagatcggaattccttacgctgctgatattatgaatttcgtaatattaacagccttgctgtctgtcgccaactcaggcttatatgcttcgacccgtatgatgtggtctttagcaaatgaaaacatgatcagctcccgttttaagaaagtgacatctaaaggcattcctttaaatgccttaatgatcagtatggctgtatcttgtttatctctcgtttccagtatcgtggcccctggaactgtctatgtggtgatggtcgcaattgctggatttgcaggagtcgtggtctggatgagcattgccttgtcccaactcttgtttcgaaagagatttttgaaaaaagggggggatgtaaaagatctgacatttcgcacgccgctttatcctcttatgcctatagccgctctcttattatgttctgcttcttgtatcggtcttgcttttgatcccaatcaaagaatcgcacttttctgcggagttccttgtatcatcctttgctatctcatctaccatttcaaaagaaatgttacaaaagcgaaaaaaatcagccaagaggaatatccagccgatcacatcctataattaaaaaagcacaccccgctcagcatgggatgtgctttattttttattctgtaattaacgtatgaatcagcttcggcgccttcgcttccgcggcgatgcggatgttgtcatagacttttgcgatgacttcatcgacgttttctcggttagcgtaaagcgttacgagcggttcccctttttctactttgtcgccgacctttttgcggagcatgatgccgacggctaaatcgatttcgtcttcttttgtggcgcggccggcacctaacagcatcgccgcgacgccgatttcgtccgcgacgatttcagagacgacacccgcttctttggcaggcacatcaatttgatatgcggcttgcggaagcttagacggatcgtcaacaattgagctgtcgccgccttggtttttcaggaaatccttgaatttctcaagtgctttgccgtttttcatgacttcttccagcttcgctctcgcttcgtccaatgtatcggcttttttcgcaagcacaaccatctggctgccgagcgttaagacaagctcatgaagatcctcaggcccctcgcctttgagcgtgtcgatcgcttctttgacttcaagcgcatttccgatcgcaaagccgagtggctgggacatgtctgaaatgacagccattgtttgacggccgacgttatttccgatgcgtaccatcgctttggcaagttcagctgcgtcttcttctgttttcatgaaggcgcccgctcccgtttttacgtcaagcacgatggcgtccgccccggcagcgatttttttgctcataatcgagcttgcaatgagcggaatggaattgaccgttcccgttacatcacgaagcgcgtacagttttttatcagccggcgttaaattgccgctttggccgatgaccgcaaccttgtcgcggttcacaagtttaataaattcatccttcgtcagttccacgtggaagcccatgattgcctctaacttatcaatcgtgccgcccgtatggccgaggccgcggccggacatcttagcaaccggcacatcaagagccgcaacaagcggagcgagaacgagcgttgtcgtgtcgccgacgccgccggtagagtgtttatccactttaattccttcaatggcagaaagatcaatcgtttcaccggagttcaccatagccatcgtcaagtccgcgcgttcacggtcactcatatcctggaagaaaatcgccatagcaagcgcgcttgcctgataatcaggaatgcttccatctgtatagccgttcacaaaaaattgaatttcttcagtggtgagttcttttccgttttgttttttgatgatgatatctaccattctcatgtttggtcaccgatccttttcgattaagttcagtaaatcaagcccacaattgctgctgataaaaagctgacaagcgtagcaccgtataataatttcaagccgaaacgagcgacgacatttccttgcttttcattcagtccttttacggcaccggcaatgattccgattgaggagaagttcgcaaatgacacaaggaataccgatacgatcgctgttgtacggccgctgaaatggaaaccgttttgcgtaagcgacgtcatggcgacaaattcattcgataccatttttgttgccataatgcttcccgcattaacagcttcattccatgggataccgacaagaaaagcgaatggagcaaacacatatccaagaatgccttggaacgaaataccgaatactgcattaaaaatgccattgatcaatgcaataatcgcgacaaatccaatcagcatcgcagcgacgacaaccgctactttgaaaccgtcaagaatgtattctccgagcacttcgaagaaggattgtttttcttcttcctcaacacgaagcatatcctcttcttttgcaacctcgtacggattgataatagaagcgataatgaaaccgccaaataagttcaaaacaagcgctgttacaacatattccggtttcagcattgtcatatacgcaccgacaatcgacattgatacagttgacatcgcagatgcgcaaagcgtgtacaagcgctgctgatttaaaagaccgagttctttcttcaaggagataaatacttctgactgccctaaaatcgcagaagccactgcgttatacgattccaatcttcccataccgtttaccttgctgagggcaaggccgatatatctaatgataaacgggaggactttccacttttgcagaatcccgatcagagcggaaataaacacgattggcaagagaacattcataaagaatgtcgtttggtccgcattcaccaagccgccaaacacaaagttaattccctctgccgcgtattcaagcaggtaaccgaatccttttgcaaatcctcccacgaggaaattccctattccggtattgaggagaatgtagccaagaataaattgcaaaatgagcataacaacaattgggcggatcttaattctttttttgccgctgctcgcgatccacgcgaggcctaaaaacacgattaaaccgataatcccaatcaaatacttcatatgtgtttctcctttatttgtattcgcttacaattactgtttcctcagaaaacggaaagcagtctgccttccgtcagctcttaatagttgtctccgcctgatgcattttctccttttacgatagaaacgcctgcgctggcgccaattcggcttgctccggcctctaccattgtgtctacatcttctttcgttctgacgccgccagatgctttcacgccgatatcaggccctactgttttgcgcattaaggcgatatcttccttcgttgcgccgcctgtagaaaagcctgttgatgtttttacgaaatccgctcccgcagacaccgctaaacggcatgcacgttctttttcttcatcagtcagaaggcacgtttcgataatgactttgacaagcgcttttccggctacagcttccactacaccgcggatatcagcttccaccacatcgtcttccttgtcttttaaagcggcaatattaatgaccatatccacttcagtggcgccttttgaaatggcgtcttttgtttcgaacgcttttgtttcagttgtattggcaccgagcgggaagccgatgaccgtacaaacgtcgactccagttcccttaagctcttttgcagcaagctccacccatgtcggattgacacatactgaagcaaatttgtatgttttcgcttcttcaattagttttagaatgtccgctttttgtgtatgcggtttcaaagctgtatgatcaattatgttggctaatgacatccttcgcacacttccttttttgttaagatattttttagcataaccgacttttgaacatatgtaaattggtaattgaaattttgttcaatgaaaggtttgaacgtgtcacaaatcattaacaagcgccctcgcggtatgctggtcaatgattaaaacgttggcatattttccggttaatgctccgtgaatggaagatacttttctgcttccgccggcaactaaaatggagcgttccttcagtctaaggtcttgaagctcaacaccgatggtccggtcattgatggcgctgctgcaaatattccctttcgcatcaaaaaagcgtgaacaaatatccccgacggcctgttttttcagcagggctttctcttcttcgttaaaatatccgagccgaaacaacagcgcttcatcacggacagtcccgaccgtaaagagagcgatattcgcctgcttgcccatctcaatgatccgttcaatatgacggtctttctccaccattcgcttcacatccgcattatcaaacacgacgggaagcgggagatagcgcggcatcgtttgaaaagcctctgcaaacagctgaatcgtttcagccgaatacgtgtttacccgggaatggctgatgccgcctttcagctggacgacctcgacgccttttacctgcttcggctgcatgttttgcgcgatttgatacatggtggttccccagctgacgccgacaatgtcgccgtcttttaccgtttcatgcatatattctgcaccatagcggcttaggtcatgtgtaattcctgcataatcgggtgtcggggaaaacacaacatgcgcctcaaggagcccgtatttctcttcaagtatggaaccgagcgcatccaaatcctcaaaagggtccatgacgcgaatctggacataccctttttcctttgcatattgcagcagccgggaaacggttggccttgaaatgttgagctgctcagcaatttgctgctgactgtagtcagactgatagtaaagccttgccgcttctatgcttaattgctgtttttcccgatccattctgcacctccctgtggatcagtcctgataaaactgcttttgatttgcttttattatacaggctggcgccggctttcatccacctgatttctaagaaactgaaaaacgctctgggcgcggacctgcccagagcttacttctcccaagtcatatgctgataaatgcctttcataatggcgtacattccatataggatcaggcctaatgccaatatagacagaatcaatttgccatgcggctgctgcgcgagttctgcgagcgcgccgtcaaagcctcttgtgtcgtcgggatcagcggtcatggctgtcttgatgagaaaatagccgatagccgagaaaataatggcccgggcgatattgcctgcgcgtcctgtgtttttcgtgatgcatatcatctgtttgttcatttttgatgtatcgaattctttcataaaagcagcccgaacgcctttcataaattgaacaatcgcaaatacgataaaacccgcacccgtaagccctgtgagccattggccgaacggctgcgccaatacataagcggaccacgtctgttctgaagtgccgccgtccccttggccaaacacaaatcgcaaggcattccaagcgatggatgtgtaaacagcggcactgaaaaagtttcctattctccgcgacaggcctcgcctgctgtttccgtgcccctccgtgtccttgatcgcgcttaacaccatccagatcacatagccgataaggccgatgcctataaaaaaaagcaatagtgacccatacggcatgcgtgatagcgtttggagagctccgctcgaatctttggcgcggcctgccccggcagccgtcataaaagccaaaaccccaagcagaataaaaacgccgccgaatgcaaaataaccaagcctcccgaatcgtttgatccaaggcttggtttcctgttttatttttgacatgtaccggtctttcaccgccatgtgtccaaccctctttcacagaaatctttactgtaacattcccgattgaacaaagttgaaacagctcctgcctcagctatggctggctgagatacgtttttgctgtttagctgattgtgcaggtgtcatccaagcagccgctgcggcagctgtgactccgcctgctaatttcccaatgatcatggccgccgccatttcttttttcattccagctacaaaaccgagatggctgccgagtacaaaggcgccgctgaccgcaaacgcgacattgatgacctttcctctcggcgtcatatcctttaatgaagccagcattgggatatgatgcgccaaagaggtcactaagcctgctgttgctgtctcatctaaatgaaggcatttccccagagcctgaagcggttttttaaaggtttttgtaataaatgccgtcatcgggaacgcccctgccagagcaatggcgatggtccctgtcgtttgtatccctgtctcgacattctccattcccggaatcagcacaatgccggtcatcgtttcaacagaaacagctgcaagcccgataatcgcaaccatactgaccgctttcccgaagagatgaaacaactgaatcattctgtcggtgtatcgccataacccaaaagcgatgacagcagataacagactcgggatcagaagatttttacctatcatgccgatgtcaaagcctgcgcataatccgccgattaagcaaccgatcggcactgtgcacagcccgattaatatgcctttcgcaaaatacggatgatcctctttttcgatgatgccaagagcgacgggaatcgtgaagacgattgccggccccatcattgttcctaaaaacacccatgaaaacagcccggcctgcggatctttcgccatttctccagccagcgcatatcctcccatatcaatcgccaaaatggtgttcgcaaaggaagaaggatccgcgccaatcgctgtgtaaaacggagcaacaatgggaatcaagattgctgccagcacgggcgccagcgatacaattccgatcatggacagcgccagcggccccatagccttaaagccgtccgcaaaccgctcgcctagcccccatctgtttcccaaacaataatccgctgctccccatagtaaaaaggcagccaaaatgaatacaaccgcgtcattcaccgtcatggttttctcctttttcaaacgtatgattggttttatcatatcatctgaaatcaccgaatagagttgatcttattcaatatgagctaaaaattcttttatatcggctttttcaacggctgttataatgcgtcgcgctttttcttgcgggaccgttaatgtcaatttttctattatgtcttcttcagacagctcatttcctggtgccccttttgggcagtccacacgcgcttcgcaaatccggccgtctgataaataggcccggacaatcgtgaaacggccttttggaacggcatgaggagccggctgaatagcattgtcatatacgcgctgaattcgccccattgtcgtttgaaccccgtttgggatcggctggctgctgaaatgttcaacggtcaggccgtgtccatgcaaagcaagagcaatcacatattcaacgctgaaacggccttcctctccagcttttggagatctttccgtcaatgcagcatctccgcctggcggaaatatcacttcaatacgttcggtattggcagcagaaatggtttcttcggagataagctgtcgtaccgcatctgcagcatggtgtgccgcggaacaaaatggatagattttaaaccatagacccggctgcacaattctccacggtgccccccaatcgtttagcaaagtgtgttgtgctttctcaacgtcaccgtacagactgaagaaaccagtttctccatcaagtgccgtgcgggacccgccaaattctgattgggccagcttaacggccagcaagccagcctgagccgccaaaccggcgtgcagcggtttcatttctgttccaaattgcaccctcatcccagcagattgcgtagccgcaaaaccaattgctttttccaactcttcctgagtcagctcctcagcataacctacggcgcaggcagcagcgatggcaccaagcgtacctgtattatgccagcccttctcatagtggcggctgccaattgattctcccagccgtgccatcacttcaacaccaacaacataagcgccaagaagccgctcgtcatgtccgcgagcggcagaagcaataagggccggtacgatgactgcactggggtgtcctcttacatcggagtggacatcatcaaaatccaatgcatgggcgataaatccattgagcatcgcggattgtaatggcgcggcctttttgccctgtccgataacaggaacaaggggccggcctccttcatcctctatcagacggaggagcttttgaattcctttatcttctcttcctgcgaatgaagcggcagtaaaatcaagtaatcccttttttgcttcgtgaatcgcgtcaactgaatgctcaggttgtgacgttctcacagcctctgcaagacctgctgtcagcccttgtttgctcatttgatggtctccaatacaataaccgccagctccgcaaagtattgagaggcaaccgtaagggcttcttcatccagtgtaaaggccggatgatgccactcctccgtcccgttcgttcccatccagacaaaaaatcccggaatcttctcttgatacagagcgaagtcttctccgcccggagactgctcagcgtgaacggtttgatagccaagccgtgccgcagcttcggatgccgcattcaaaaatgtgccgtcattctgaacggaaggcaaataaggaaaccacttgaattctgcttgtgccccatagcccgctgcaattccttcagccactcgtctcatatgctcgggaacagcctgcctcgcttctttttgaaaggttcgaaccgtcccctccatttcagcttggtctggaattacgttccacgaggtgcccgcctgtactcttgtgatactgacgactgcgttttgcagtgagctgatattgcggctgaccacagattgcagcccgctgatgatttgtccggctgcagcgattggatcaatactgttatttgggatgccggcgtgcccgcctttccctttgatgacgatctcaaatcggtcaacacttgccatgagcggaccttcctttacaccaatggtcccgacaggcagatccggcttattgtgcatgccgaaaatcgcagaaacgccattaagtacgccagcttctagaacctttcttgctcctgcggcaatttcttcggccggctgaaagataaagcggactgtacctttcagctcggcccttctttgattcagcaacatcgctgtgccaataatagaagcagtatgaaaatcgtgtccgcacgcatgcattgtgccatcaaccttagatgcaaatggaagattcgtctgttcttggatcgggagcgcgtcaatgtccgctcgtattgctatcacggggccgtcttcccgtcctttgatttctgcaatcacaccagtcttcaattgagggacatcaagtatttcgatttgctcctcctcaagccaacggcggatttttttcgtcgtttcaacctcttgaaatgacagttcaggatgttcatgaagatcacgccgcatattgattaaacgggtatgaaacgctttgtcggccattgttcttctccccttcttatataagctctgcaggctctcccacctgcttgataaatcgtttcgtccgttcgtttttcggatggtcaaacagttcctctggcgttccctgctcgataatatggccgtctgccataaaaatcacttgatcagcaacctcttttgcaaacgccatttcgtgtgtaacaatgatcatcgttgtttgtttttccgcaatggacttgatgacctgaagcacccctgtgacgagctcagggtcaagcgctgacgttggttcatccagcaaaatcgcatgcggattgaccgcaagcgcccgcgcaatgccgattcgctgctgctggccgccggacattgtgattggatagctgtcagccttatgctccagaccgacttgtttcagaatctccattccaatacgtttcgcttcgtcgcgtggtttatgttgagccacgattaaagcttctgtaatgttttgcagagccgttttatttttaaacagattgtagttttgaaagaccatggccgtttgctggcgaagccgatgtgcttccttgcgtgtaaacttttccgcattcagtttggcttctccgatttcaataaggccttgatccggacgctctaatagatttaagcaccggagaagcgttgattttccggaaccggacggaccgatgattgccaccacttctccgcgtttcacttctagatcgattccgtcgagcacgacgagatctttaaacgctttgcgaatattttttactgttatcaactgatttcacctctaagtccggtatggcttgctcatggcacgttcaaacaagtcctgcaaaatgctgtagataatggtaagaacccaatagacgatcgcaaccgccaaatacgtctcaaaatatttgaggtttcctgaagcgtacatcttcccttgggcgaacatctccatgacccctaatgtaaaggccagtgacgtttctttcaggagcccgataaatgtattgcccgttgccggaatcgcatttcggatcgcttgcggcaaaataatccgtctgtatgcctgaaattttgtcataccgacagacaggcacgcctccagctgcccgtcatcaacagaattgagggcggcccggaagatttctgccaaataagctgcgttttttaagcttaacccgatgatggcagctgtgagagctgtcattttgctcatctctggaaatagctgcggcagcccgtaatagattaagaacagctgtacaagtgtcggcacgcctcggaaaaaggatatatacagctttgacagctgatgaagcactggaattttgttttttgtaatgagtgcgagaataagtcctccgataatggcaaaaatcatagctgctattgccataaacaaggtgatcggaagggcctgaattaaagtcgggaacgctgatatcatgaattcccaatcaatcgtgttcattctggtgagtcaccgccgtttcttaatgcttctgttctactgtgatatcttcattaaagtatttttcagagagttttttcagtgttccgtctttacgcaattcatctagggccttattgacttttttgcggagcttgtcgtgcgcatcgtccttggcaaatgggaatgcaacctgttcgtaaacaatcggatctcctgcaagctttaatggcaaaccggtcttcttgatttgcgcgatcaatacagttcggctgttgacataagcgtctacacggccgtacgcaacatccttcagcgtaccctcttgtgtttcgtacgttttgatattgatttttttatcaggatctttgctttcaaggtttttcgcgtggtttgaaccgagaacggctgcgactgtcttgccttttaaatcgtctactgatttgatgtctgtattgtcttttttgacgacaatctgtgttcccgcataagcgtatggtttcgtaaagttatacgtttccttacgttcgtctgtcacagctacctggttggaaatggtgtcaagcttgcctgtttgaagctctcccatcagcccgctgaattcaagcagcttccagtccagtttcatgtcaattttcttagcgactgcttccatcacttccacgtcaaagcctgtcagctttccgttttctttataagcaaatgggtaactttgtcctgtcgcaccgacatgaagcacattgtcatcctctttactgctgctgtttccattgccgcaagctgagagcaccgctaataatgcagcaacgaccagcactgtccattttttcatcttcatttgattttcccgccttttctatttttatagatcatgtcgcaattgttttttcatatagactgtgatatgcccttttccaaggtcttgttcacctgagcggacatatccttttcgttcgtacatctcaatcagccacggatgcttatccgctgttccgagtgagacaaacggaacctttaacgtatcgcgaaggattgtttcctccagccattgaagcagctttgttccgattccttttttaccggtgtcggggtccacagcaaaccaccagatatgcggaacgccatacggtcccggctgttttccccaaggcattctcaaggtgatggtcgcgatgatccgcccgtcttcttccatgacgtagcaagcattttcccgaatatttttcagcaccaaatccaaatccgcatgagcagcagcaaaacgaatgccgagctttcgaatcggttcataagcccgcaatgtcagctcgagaagctgttcggcatcacgttcaactgcaaggcggtatcgtggcttcatctagcgttcctccttactttgcatagcggtttaccggcttttccaaaccgaagtgctctcgtaatgttgtgccttcatattcttttctgaacacgccgcgctcctgtaaaatcggaaccacttgatcaacaaacacttcaattccttctggaagaagcggaggcatgatgttaaacccgtcacacgctttcgtatccacccattcctgcatcttgtcggcgagctgctccggcgtgccgacgaagatatggtggcctctggagcctgcaacgtatttgtaaagctctcgtatcgtcatattgtcacgttcagccatctcctgaacaagcttgaagcggctcttcaccgcattggaagcttcggcgtcaagcttcggcagcggcccatcaagcggatatgccgacaaatcaattccgcctaagtaattttggagaatttgcagaccgacagatgggataatcagatcttggagctccttgtatttggcttgcgctgcttcttctgtatcggcaatgattgggaaaatacccggcataatggcaattttttctggatcacgtccgaattccgcagcctgttctttaatggattgataaaattcttgagctgattccaggtggttttgtgctgtgaagatcacttcggctgttttggcagccagcgcttttccgtctcctgatgatcctgcctggataatgaccggctggccctgcggggttcttgaaacgtttagaggtccgcgaaccgagaaatattctcctttgtggttcagctcatgcattttttctttgtcaaagaattcacccgtttctttattacggataaaggcgtcctcttcccatgaatcccaaagcccctttacaatctcgacaaattcctctgcccgctgatagcgcaaatggtgttcaaggtgcttttcaccgctgaaattcagcgctgttgattcaatagatgaagtgacgacgttccatccggcacggccattggacagatgatccaatgacgcaaactgtctggcaatatggaatggctcgctgtatgtagtggaggctgttgctgtcagtccgatttttgatgtgacctgcgccaaagcagagagcagggtgaatggctcaaaccttgttaatacatttggatgtgatttgctgtcaattgaaaggctgtccgctaaaaacagcatatccagcttgcctcgctccgctgttttcgcaagctctttaaaataatccaaattcatgctcgcatctgacggcgcgtccgggtgccgccaagacgcaacatgatggcctgtacctgctaaaaatacccctaatttgatttgtttctttttgcttgtcatggcgatactccttttatcatgtttttaggctgaataatccgaaaaataaactcctatattcctagtcgtttaatatgaataaatcaaaatgtacctttgtcttggacgtttgtcaatgagttaagattaattttttctattcaagcgaaaagacccttgcgtgaccatgagggaacggcattgattcattcaactagtgcaacctctatatcggcaagaaaactgagtctaatgaagcaaagactcagttttcttccaataatttcatataagatttcgccatttcctttgccttttcttcgcttttgcaaaccgcctatccattcagacgccgtaacgattgtataaaaaaacagctgactccagatattcaaaccggaatcagctgattgatgtgaattaattaagctcatgaatactctcttctgctttagcggaaaacactttaggctccaaacagtcaaggtcttcatgaaataaatttactttttggatttgccgattgtcatagtggtggaaatagtagtttccagtttcgttgcacatcacggaagtatattgcgtataatgaatttcgtcttcttccgttatcactgcgccctttggtatcgtcatatttgccaaaatttgaaaagcggctgttacacctttcgtttcatcggccgccggctctagatgttctttcaaataaacagctctgacaaaccgggaaggcggtgtataatcccccggcagaccaacagttcctaagccttggccaaaagcagaaagggctaatccgcccatctctttgctctctaattgcttcggtctgattcctgtatattgctgcagattggttacatgccatataaagtcggggctgttcgtcatgacaccaggttgattatcatagactttgaggccgtctgctcttggttctatcgtcaggtttcggcccgtccggtctgacaatatccagtgaagcggtaaaactgtatccaatagatctaattttttctctacaatcgttaaagatcgaatcttttcttttacgtcttccaaagactgacagactgacagcacccatgtcacaaactcatgcgggacaatgtgaacggtatcttcccgtatcgttttttcgtactccgcatagcccggaaaataaagcgccgcacaagataaaccgctttcattaatgccgtcggcaaataatatatttccaagttttctccccataccgataaacgcgtactgtgtctgatgggcccttccgtcagcttcactgttccagctgtaacggcgcggatagagaatcacctctgtccccagctgaaatgcaaaatccattgttcttgctaatacatgtttacggtcagcagtttccaatgtaagacttgtgcacatttgatcagtccccttttcaattcagattaatatcatacatattgtgaacgaattggttttatcagcataacgaaagtcaaatcgattcgtcaaagaattgacattacatcaaataaaacgaaaaaatccagcctttagaaggctggattttttattatttagccaaaacaagctcgtgaatcgcatgtgcaacgccatgttcattattggagcgtgtttgaaagtttgctgcttccaatacttctgggatggcgtttgccatggcaaccccgcagcccgcccattcgatcattgtcaggtcgttcccgttgtcgcctatgcacatgacttccgcctgttcaattccaagcagctgagccagctggcgtacagcatttcctttgctggcttccgagtgcagaatttcataaaagaaaggcgcgcttctgaccattgtatatttttctctcacgtcttttggaatcgatgtaatgacgcggcttaagttctccggtttatcaataaacatcactttcgggatgaggatatcttttggcacctcgtcaatcttgcggaaatgaagcggcacctgtgtcacataggattcgtatacggtaaattcgctaatatcccggttaggcgtatacaaattagatgagtcaaagaaatgcatcggcgtcttcagctctaagctcaggtcatataatgaagtcaaatcatcataaccgagagacagctctgagaccacttcatttgtatgcgtattttgaacaagtgctccattatacgcaataacatagtcgccttcttcaattaaattcagttcatctaaatatctctgcacacccccgataggccggccggtgcaaagcacaattttgacaccttccgcttttgccgcgtgaagggcgtcgcggacctcctctgttacttcatgatgatcatttaaaagtgttccatccatatcaattgcaattagtttgtacatcctgcatctccttcatgtcgttttcaggctatagtcccatcatatcgttttttctttttgatattcaaccggaagagatggttttctccggattctgtttagacgccgcccttgtcttcggatacgcaagcgcggtttccgctttctttctgccttgacgccgttttctgcttttttctgtttcatcagcagaaagccggcagctagaaaaggaatgccggttatattcaagatggcaagcttcacacccgccgcgatgaaaaagaacccccatgaagatgatggattccgtctgatcatgacgtaagccgccatttccagaacgatcaggatggcatgaagcactatgccataaatcagcaatacaagggcaaaaaacaaaacataattcacgattgcccctgagtacatcatagcgcgcatcatttgtataaacgataaggactgcatggagccgctgatgacattagggttatagatcgtatagtcactaaataaatgtttgactttgagaaaagcccataatataaatatccattgaatgatatgtaaaacaagccccgctgccaccagtctttcagctttttgatttctcatctttctcctccctgccggtctttgattcgattcttgtcatcgtttttctctgtccattttgctcccatatcaatgtcccgttttctcctcttttcagcgtgcttttgagcggataataagggccgaggtactgaatctcgatagacccgtcagtgctttgggaaatcaccttgtatgccataaaaggcagctgtacctctcctcttccttccatcacttccgtttccacaacctcgtcttcggtaaatgtgactgttgctgatttcacaccgtccgttggcccgggggcacgcccctcatcccacgttccgtaataaaacggcgtctcttctttttgctgctggcagcccgataccatgatgcatacagcaattaaaaacaaaatgccatatttgtttctcaaggggatcaccattctttcctccttttttgggcgaatgccgtgccactgtgccaatgactacataagttataaggaattcacccacaaggagactgatcacatgaacccttatcaatattacagccctcagctgcctcagcaggaaccttactatagccactatgagtacaatccttatccgcagcaggatgtatacgatccataccaaatggacagacagccggcattggaaagaagaatcgcagcacttgaacggcaaaatgaacagcagtcaagagaattaacccgtctgacaaacgaagaccgccgtcaaaatcgggaaattgcacggattgccgaacaggtcaatcagttaagccaggctgttgaacgccatacacgccgcctaaatcggctcaatcagcgcctccgtacagtagaaaaccggctgaatatcccatttactgcaggggaaggcggtttctgagcgaaacaaagaaaaaaagcggaatacgattctcccatctcagggtttcgttttccgcatttcttatatgttaaaacggaacatttacataaaaagggtttgtacccagtatacaatctttaccgttttcattcaaagatagaggggctgaggaaaataattgtagttcctctttgacggaatttcttttcattcaagttgcatgataataccgactcacgtcaatcgatacatggagggatcattcatgcataatacacaacacggcttgcagcagctgaaccaatgccgccaaactgctcagcagctcattcagcaaacacagcaaagcagccagcaatatcgccaaatgcttcatcaggaacagcaaaacatccaaatgctgcagcagattctaaaccacgaacaacaagctgcacataccattcagcaagcactgcacgggcatgacatggcgattcaaaagtgccagcaggttgtcaacatgtgcaaccaaatgcaacaggaacttactggacaatccagcgtcatgaatacgaatgtgtctacacttccattcggccaaaacacgacatttcagcagcaatcctaccagcagtaacatataaaaagctcaacacaatgcgagtgttgagctttttttcttactgttctttgcgaatatgtatatcctgaatagactgtttcggtgcatgaaatctgctctcggcttcacttcttgcctcggcaaaagcccgcgcctccacatgatctttgtagacatccagctgaatcaaatacagcgggcgcactttaaatccatgaataatggttaccgcccataacgggaccacaataaaaacaccgggcagatcgggcaaaacaaaaccaaacgcaaaaatgaaaaaataaatgatgccgtacatgatccactttctatttctaaccttgatgccaataaataaaaaggcaaaaaaactggtaatggcaaaaggcatgaaaataaacagcatccaccagctatgcagccattcccaagcggcacctctttttgtaattcccatatttttctcctcctatttacctataataatcgattaggcacaccgcgtcacccataaacgggaaaaactttctcccttaaaaatagtgatagacggagaacaggtttcttgctatattattaattgataatgataatcattactaatctattgagatacatagtgggagggttcttgatgaaaaagaacatattgctcgtgggcatgcttgtgctgcttctcatgtttgtcagcgcttgcagcggcacggcttctaaagggagctcaagcgattctgcttccgaaaaaacagaaatgagaacatacaaatcaccaaaagggaacgtcaacattcctgcacatccgaaacgcatcgtcactgatttttatgccggtgaattgctgtctgtcggggccaatgtggtcggctcaggctcatggtcatttgataatccgtttttaaaatcaaagctgaaaaatgtgaaggatgttggtgatccaataagcgttgaaaaagtgatggagcttcagcctgacttaattgttgtcatgaatgaagagaatgttgataaattaaagaaaatcgctccgactgttgtcataccttataacacagcgaaaaacgtagaagacacagtcagcatgttcggagatatcgccggagcgaaagaccaagcaaaatcctttatggctgactttaacaaaaaagcggaagcagctaagaagaaaattgccggcgtcatcgacaaagatgcaaccttcggcatttatgaaaacacagacaagggcgaattctgggtgttcaatgacaatggcggacgcggcggccaagctgtatacaatgcacttgggttaaaagcgcctgaaaaaattgagcaagatgtcatcaaaaaaggagagatgaaacagctctctcaagaggttattcctgagtatgccgcagattatatgttcattacggattacaacccgaaaggcgaaagcaaaacactcgacaagctggagaattcctccatttggaaaaatcttgacgctgttaaacataatcgcgtgtttatcaatgactttgactcgttctacccgtacgacccgatttctgtcagcaaacaggtggatatcatcaccgacatgctgatcaaacgggccgaagaaaataaaaaataaaaaaacggcacagtcatgacgctgtgccgttttttatgattcactttaattttgactgtacggagtccggcatatcttcaaacttgacttcttcccaagtctcgacatactttcctttcgccttcaccttcaaatacgcgttcttccgaagctctttgccggcgaaaaaggtcacttcttcttttttcccggatgcattatatccgtctaatgtatattcagtaccgcccggactaagatgtctgccatctcgatcaatctgaacatagacatcttgctggtgaataaacggattaaatctgtctgtaacatcgttatgaaaaaagagaagcccgcatattacggcagcagccgccaagacggccaggattgccattgcttttttcatctttgcactccccttacttgttcatttttttcaaatagcttgaccgcaccgcgaggaagaatagaagctgaaaaatgaaaaaccctccgatggtgagactgagcggccccgctacatcggaatatccttccacagccaatgttctcaaggcaaacagtgtatgcatgacggcaatgacaaatggaaagaagaaaagaatcgccaattgtattgtcacgctttgcgccatttctcgctcactcaggccgattttggccagtgaacggtagcgctcccggtcttcatctaaatcagtgaacagcctgaaatataagaaacttgctgccgcgacaaagaatacaattgcgataaacaggccgataaatagactcaggctcggcagctgcaccgtatcatagtaagtccccgcttttgaagcaaaatcagaatgcacgtcgatataattgccgtaaatctcattttgcaaggattggctgatctcaagactgtctttccaatgatcatagctgtagccgtataatgacgctttatcaccgagtgatttcagctgatcaaaggtttgatcattcaccgcgatgatagcattcaatgagatcagcggttttttgacttcttttaccgacagtttttgatcagacagctcccctttttggttcagcagcttcagctgatccggcgcttcgtttttgaaattgcggtcatacgttcccgggaaatagacagcctcgtcttctttcaggccgttcactttgacatggaagtattttgccgcatccgattcactgatcatgtaaacagggggaacagtttctccttcctgatagcgaacataggaaacatctattttgtctttcgtatacgtaaaaccgtgtgttttcagttcatggtcaatatctttcaaatgagtctgttcttttggattgttgctgtaagataaatactccatttcataagcggactcttccgctccgacggtcgatttgtacattgcgagcacgcctgtcgcagtaaacgcaaccgcggaaataatgctgacaataaagaacaggcgggcgttgtcttttagacgatagacaaggtcagaaacccaaatgatgtttttcccgcgcagataaaaggttttccacttcttcagcgcgcgcagaatccatatgctgctttggctgaaaaagaaatatgttccgataacggtgagcagtaaaatgataaacggttcggccccgtggacattgcctttaagaaccatgccgtacccgccgcacagacaggcgatgccgaataaggacagaagcacggacggcttaggctccggtttaaccttgccagtgccctttattaatttgataaccgtatttgatctgacaaaaaggatcgtaaactgcgataaaaagaaaaataagagcagaaatccgcaggccgtaataccgagcgctttccaaggcatatacaaaggcagcgcgtccatttctaaaatataagcgccgaccgtaaagaacgtctttgaaaaaatgaatcctccgataataccggctgcaattgacatgacgccgatgatcatattttccgcagtaatgagctttctcagctgccccggcgtgatgccctgcatgagcagaatgccgaattctttatttctcgatttcaaaaatgcattaaccgaatacagaacaaataagaaagaaaaaacaaagatcatccattccgcggcggttaagccttttttggcgatgttattcaggtagccttcctttaatgccggatgaaacaggaacatcgcaaaggtaaagaaaatcaaaacggaaaaggcgctgcttaaaaagaatgcaagataggcccttttgtttctcgtgacgtttttataagcgaactgaagaaaggtcatttgcgtttccccccagcatagacagcacatcgagaatttgttcataaaatacttggcggttttccccgcggtaaatctcattaaacagttcgccgtcttttataaagatgacgcggcggcagtagcttgccgaaaccggatcgtgggtcaccatcaaagccgtgacatgatcatcccgattcaggctctgcaacgtttccatgacgtcttttgtcgctttggaatcaaggtttccagttggttcatcggccagaatgagtgacggcttatgaatgaccgctcttgcgatggcggcccgctggcgctggcctccggatacttcaaacgtccgcttgttaagcaggttttcgataccgagctttgccgcgatgccgtgcagtttttcttccattacagacggcgcttctttttcaagcgttaacggcagcatgatattttcaccgatcgtcagcgtatccagaaggttgaaatcctgaaacacaaatccgagctgcttgcggcggaaatgagcgagctttgtccgcttcaggcgatgcgggttttctccgttaatcaggatatcgcctgaatctggacggtcaatcgttgaaatgatattcaaaagcgttgtttttccggacccggacggccccatcaccgccgtgaactcgccttcttctattgaaaatgaaatttgctttaaggcctgataggacacttgtcctttataggttttatttatatgtttgacttcaagcatattcgccatgaaaatcctccttatggttttattcttgttgatctgggctgctttcatgtagtgccgggacgttcaacataaaaatccccttgacataaatccatgttatcaaggggaaacaaagcgggctatgttgttttcttaacgcagccttacatttttgtaagaaatgaaaatcgaactgatgtcccttcaccgggagacgagctgatgtccaccgtatgattgagcttatctgtaatttctttgacgagatggaggccgattcccgtagattcttggaaacgccgcccgttttcacccgtgtaataagggtcaaacacccgcttgatgtcttgtgagggaatcccgacaccgtaatctttgacttcaagcaccgtcctgtcttcatcgcagaagacattcagctcaagtctgtcactcttgcccgctgaatacttgaccgcatttgtgaccacttggccaatcgcaaatttgagccatttggcatcggtgtaaatctgatgatcatcgcaaacgttcattttcggataaacgcgatattgaataaaaaatcgtttatagctttgaataactgattggagaagctcggacagggaaaccgcttcgattttaaaatcccgttcaaacaggtcgagccttgaagaataaagaagcgtctccagcccgaattcaatctgccggacttcttttttgatttgttcaaaaacgggctcatcctcttcttgaatgattaaattaatgaccgacagcggcgtctttacttggtgcacccattgattcatatacgtcacccgcgcgtcaagcttggcttcggtctcatggagcttctggtgctgcagccggatcagctccatctgcttttcatacagctctgaacagaacactgaagaaccgagatacgggatatccgtcccttcctgccccgagctgagccaatgatacacgccgcggtctttgtaccagcgataggcaagatagcccgccaaaataagaagctgcacgcccaatatgtaaaacaagtgagaaaaagaatgaagacccgcaaaccagtaataaaagaagacaaacagcccttgaaggagaaaaagcagaatcagcactgcatgagaccggagaaacagcttcatgactgcgccctcagctggtagccttcgccccgcaccgcttcaatagaaacaggcgcattcagctcccgcagtttttttctgagccgcgtgatatacacgttaagtgtattatcatcgatgaatatgtcggtgtcccacgtcttttccatgagacggtcccgactcgtcaccttttctccccgctcaagcagcacttccaaaagcttgctttcttttttagaaagctcacttttttcatcctgaaaacgcagttcaaaccgttccacaaagagctgaacgccggcatattcaaccactttctctccctgctttgcggcgtactccccgtacgccctccggatctggcttttgattttcgcaagcacaatatcataagaaaacggtttttcgatataatcgtctcccccattttcaatcgccatcacctgatccatttccccgcttctggcagaaataaagatgatcgggcttgtggagtgctggcggatctgccggcaccaataatatccgtcatatgccggcaaattgatatcaagcagcaccacatcgggcttttcccgcaaaaagacatcaagaacagctgtaaaatccgcggcgaccactgtttgatatccgtatttttcaaggtaattctgcaatagtccgcgaatgtcttcactgtcttccacaatcatgattttattcaaactgaaccactcccgtttcttacactgctgccatcatcataatcgttttgggcgtatggacgcaacaccgcacaaaaaaaccgccatctcggcggtttctggtctctttagccgacctgctgcttagctgctttaccggctgatccgaactctctcattttgcttcgcactgtctcttccacggcttcaatgccgggtgtcaaatagccgcgcggttcgtacagatcgctgttttcctgaaacatgcggcgtgtttcgtctgtccacgctaccatacattccgtattgatattgatcttcgcgtggccgagcgtgatggcttttttgatctgatcctgcggaatcccggatgccccgtgaagaacgaggggaatatcagtcatgcgggagatagcctccatttccttaaatccgagattcggctcaccctgatatttgccgtgtacagagccgagggcggcggccagcgcgtcgatattggtttctttaacgatccgctcacattccgtgatatccgcatagcggaccccgccgaccagtccgtcttccattccgccgaccgtgccgacttcggcttctactgacacgccgtgttttgcggcataatcggtgacttcttttgtcatcgcgatattctcgtcaatcggctgatgggagccgtcaatcatcactgagctgaatccggcatcaatggcctgtctgcagcgttccgcactgctgccgtgatcgagatgaagcacgaccggaacggtaatcgccatgtcctctattaacgcgccgaccatggcggcaatcgttttaaatccgcctaaatagtcgaccaggcgatcggaagccgcggcgatgaccggtgattgctccttttgcgccgcctgcaaaatcgccttcgtccattgcaggccgttgatattaaactggccaattgcatattgctcccgctttgcatcttcaagaagctctttcatcgatacaaaagccatattcacccctcctttatccattacatgctgaagtattttgatacgacatccactgttgtttttttcgctgtttgaatggcttcctcagcagtcagcttatagtattcaggccggaagagctcaaccgaaacaacatcagagaagccgatttccttcagtgctgataagtgggcatctaagtcaattgccccttgtcccggccatacacgatcctcatctgttaaaaagccgattgggaaatcttctgtatcatcaatatgatagatgaagattttctttccgtccgcctgctttaagctctcaatatttgaacccattgcatggaagtgaaaactgtcaaggacaagcccgacattgtcacggttaactgtgtttacaatctcatacgcctgttcaaacgtattgaccgtacattgcggatggccgacaaactcaagcgcgatttttacgccgtacggctccgcgatatctgacagctcagtcagcacgtctacactgctctttttgatctcttcttttacaatcttctgctctgtcacaagcggaacggccaccacatatttcacaccgagggttttgcatgtttccatcatgcctttaaattcagtgatgatctcgttgtgacccttttcatcacggttgttgaagaaaacgagtgcgtttaaggcaagcggtttgatgtggtgggtttgaaaatattccgcaaggtcatccaatgaatgatcttttaagtactccggcagcttatccatagtacggatttcaatataatcatagccatgcttttcgcatagttctaaatccagtttaaggtttgagttttccaatgttgtcgcttcattaaaacaaagtttcatgccagactcccccatctgcgttttagatatgaagggagttcggcaggaaggctgtcgccatatcccgccgaactccatgctcagcttatgccagacctaattcttctttcattttcttaagcataaatcggcttgattcatccgctctttcatcgacccaagcaaatacggcattcgtcgcaattccgtcgaacttcatctctctcagttttctgaaaatcgtatcaaaatcaacctcgccttggccaatgtccaaatgctggtgaaccgttactttcgcgtcaggcggattgacgatgtagcgaaggccatgagccgctttatgattataggtatctgcaaataaaacatgtgtgaggcggtcgccggcttcgtcaaacatggtctcgatgtcgcctttgccgtcatcatagaagaacgtatgcgcagtcgagtagacaagattgatccaatccttgtcaagcgcgcggatcatatccatcgcacctttgtgcgtttcgataaaatcatatggatgggcttgaagattgagtttaatgccttctttttcaaagactggcagaagctcatccatggatttgataaatttttcttcacttgttaaaggatcatattttgaaccgctgaattcgctgttcatcaaatccacttcaagttcaaccgcaatttcgattgcccgtttccagttgcgcactgctgcctggcggcggtcttcatcgggtcccgcccagtggtaaagaggaagaagcgatgaaagcttaacacctgtatctcttaaaaggcgctttaattgtttgatctttgctgaatcgactttcggatatttataaaacgggcaaaaatcctcgcgcggcgataattcgatatattcatagccgagctctgccgttttatagaccatttcctctaaagttaaatcatcacgatacatggatggatccaatgctaacttcatattttcactcctctgttttttagttttgaactgttgtaaaagattgatagaattccggtttttccttcaattcaaccttttctttttgtccagattcctgggcttttacacacgcgtcagtcgtgacagcagcaatatagccgtcccatgccgtcggtccgctgacctcgcctttcttttgaatcgaatcaataaagtcttggatttccacatcatacgcagcgacaaagcgtctctgccaatccatcaaaatatcagtgctgaatctgccttcttttctcaagctgatgcttgatggctcgggaagcttgatgatgccgtcttctccgacgatttcacattgaatgtcatagccgtatttacagttcacatagatttcagcattgatgacgataccgccttttgtttcaatcacgacgatttgcggatcttttaaatgtggaagcgcgttttttgattttttcggatagatgacttgaacggactcgtagtcatcattgacgagccagtggagcacgtcaatttcatgaacaagcgtgtcgactacagccatatccgttgtatagttatctcctacagtcgggttgcggtgcgcgcagtgaatcataagaggctcgccgatgacatgattatcgagcgcttctttcagctgtacgtaaccgctgtcataacggcgcatgaagccgacttgaacaaggcgtttgcccactttgatttcttcttcgacaatgcgcatgcatccttcagccgttgtcgcgagcggtttttcacagaacacatatttctgggctttaatcgctttcagcacgcttgactcatgcgcaggcccccagcttgtcactaaaacagcgtctacattttcgtctgcaagcaagctgtcatcattcggataaaccgtcgcgtttaattggtattgctcaacgaccttttgtgcagcttcttgattaacatccgttacagctacaatttccgcgcctgacagcttgttcgtgatacggttaatatgttcttttccgattgctccagttccaattacgccaatacgtaaactcattgacagccactccttctgttggttacatgattttgctttctgttcctttctttacttggctctgaggagacccgtagagttcctcttgaatttgttcaagcgacttgccagacgtattcggcgcaaagagcagcccgatgatcatactggccgtcacacatccgagaagaattgcagccatcgttccaatgccgaaattggtgataatcattgggacaaacagactccaaatccctattgaaatacggacaaggaaaaacatcagtccttgtgcggaagcacgatattgcgtaggaaagatttcgctggcccataactgatagttcgcttgctgcccggctccgttattgatgccgatcacgacaataaacaggagcagaatcggcaggccttcaactggcagcagaaacagtgtccacccgatcaccgccatgaaagcggcgattccaaatacggtttttctatatttgtcggcaaagggcatgaagatcaaggcgacccccaatcctgtgaagataaacagccccatttgcaaaaggttggccatgttggcagatacaccgccgacctgctgataaatgtatggcataaagaagcccatgaccccggcggctaggttccaaaccaagtacacacccatcaaaaacaggatgctttttagatacataggcttgagcaaatcaaaatacgatgtcttattcaatacagccggcttctctgcctgagcttcctccggctgattttttgtctgccaggcgtctgattccggaagcctgattctcaggatgtacgtaatcagcgcaatcacaagcagatgggcaaatacgattttattccccaagagtcccaagtcaccggccagtacggagaggagcagtacaacgacagcgcccgcggcccaagcgacttgtgctacgccgcaatgcctggcccgattcttctttggcgcattttccgcaataatggtccatgacgcggttatgtcagcccctactgataaaccgataatgatgtaaccgcttaacaacatggggaaattaaccccgaacaaaaccaaacaaatccctagtgcataaaccagcatactattggtataaacagccttccgtccgactttatcagccagaaacccgccaagcagcgcgccgacagcggcagaaatcgcatttgcgctcaacgcgccgagcagcccgatttgcgtatcggatagcttaaggtaactgacccataatgataaaccggcggagcctgccacaattgaaccggcatcaatatagttggccaatgctgccgcgattgtccgtttattgaaggctgaatctccattggtattgcccatatgttcattccccattaagccagatccaacaactgctgatcaatatagtttctcgcaatcaatgcatactccagcgggtttgcaacatcggggtcttgttcagcttcaatgacaatccatccggaataactgtgcttcaacagcagctgatatacttctctaaagtcaatgcagccgtcaccgggaaccgtaaacatgccttttaaaaatgattgccggaacgattgtccttcgagcctgcattgttccatgacattcaggcgggcatccttaaagtgcacatgcttaatgcggccgatatgcttctcaagcatccccatgtaatcgccgtcagaaatatacgcatggcctgtatcatagaggaggtgtacatgcgcagggtctgttcctgccatcaggcggtccacttcttccgctgtttggacaccagtgccgagatgatgatgatagacaagcttcaagccatgctgagcggcaatttcgccaaggtgattcagcccttcgcaaagccgctcccattcatcatccgtaaagtgcggcttctctgtgaacacatttttctccaagctttgcacgctgtacgtttgttcagagacaactgcgacatccgcgtttacttgctgcaaatactcacaatgcagggtaaatgtctttgccgcttcaccaagtccgtcacgcaaaataaaactgctgaaccattttcctgcaatgcgtaagttccgaagcttcagctctttgttcaggatggcaggttcggggaaaaagcccccgacctccgtgccttgaaaacgtgcgacaacgatatcacttaacaaatgctgaagtgtatttcccgctccaatttcaggcatgtcatcattccgccacccaatgggagcgattccccacaggatttcatttttgcccatctatggtgcctcccctctaatactgcttcgcagattccagctttttctcttttgcttcgtatgctttctgaacgctttcttgttcagatacctctgccaccccgacatgccaccagctgtcatagccgtccgtcattgttttaggcagcaccttcatttcaattaatgttgatacatcctgtttcttcgcatcctctaacgcagcttttaattcttctactgtgtttgcacggtaggttttcgcgccgtatccctcagcgactttcgcgtaatcgacattcaggatttggttgtcatctgtgcggaactcgcaatagtagctgccgctgccgtgatccatttgcaggttgttgatgcatccgaatcctgagttgtcaaagagcagcacattgattttcttgttgtactgaatcgccgtgatcagttcagaatgaagcatcaggaagctgccgtctccgacgattgaatacacttctctgtcagggtgggccagtttaagaccgagtgtcccggacacttcatagcccatgcaagaatatccatactccaggtgatacgtattcggaacattagaatgccacagacgctgcaaatctcctgggagtgagcctgctgaacagatgatgacgctgtcttcaggaatcgtctcgttgattgtcagcaatgccgttgtttgcggaagctccgtattcaacgcgtcagcatattcattcaggacctcttgagaaaagtgatttttgatttccggatcaaatgcttcccgcttaaacgtcactttgctgagacgctcgcgttcagctagccattcgtccttcagctcccggatcgttgtgccgaactcgctctcatagccttcaagcaagccgtgcagtttgccaagcgtcactttcgcatccgccaccacttggaatgcatcaagtttatacgcctgcattcggctgacgttaatgttcaaaaacttcgctttatcaaaatcaaaagcggtcttagaggatgtcgcaaaatctgtataccttgtgccgatgccgataatcaaatcagcttggcgggccgctttgtttgccgcaagtgtacctgtgatgcccattccgccaaggttgttcgcaaaatctgcctcaacggtagactttcctgcctgcgtttcaactaacggaatgttataggcttcagaaatggcaaccaattcatcgcgcgcaccggaatattttgcgcctccgccgacgagaatcacaggttttttgctggatttaatcagctccgccgcaccttgaagctcgcgctcgctcggctgcatgcgatcaatatagtgaacccgtttgacgaagaaactttcatcaaaatcgtatgcttccccttcaacatcctgagaaatacaaatcgttgccggacctgcttttgccggatcagtcatgacttcaaacgcgcgcagcaaactgctcatcagctgctcagggcgcgtaatgcggtcccagtatctcgatacaggcttcaatgcatcgtttgtcgtaatcgccgcactgtattcttgctccatttgctgcagtacagggtctggctgtcttgtcgcaaatgtgtctgccggaatcaagagaactgggatattatttgccaatgcagtgccggctgccgccaccaagttagccgctccaggtccgacggatgtagacaccgcatatatttttcttctcagcatttgcttgctgtacgccatggccgcatgcgccattccttgttcatttttcccttgatagactttcaaatggcctgcatcctgctcaagcgcctgcccgatccctaatacgtttccatgaccgaaaatcgtgaagatcccttcgacaaaaggctcttcctttccatctacatggatgtactgctggtttaagaatttaatcagcgcctgcgcagttgttaagcgaattttcttacccacaaacgatcccacctttactcgatctttttcaattatgactgtgcttcaataagctgttcgatttcttccgcagtcggcatcgcttctgacgaactgtgcttgctcaccacaatggaggctgaagcactgccgtatttcaatgccgtttcaatgtcttttccgctgacaaggccatagataaaggctgacgcataggagtcaccggccccaaaggttttcagcacttttgtcttgtacgcttgagcgcggaatacctcgccggatttgctgtatgcgtaagagccttcgacgccgtgtttgatgacaacgaggtcggctgaatggccaaataaatgattgacggattcttcattgcttccgcctgtgcggttttccatcacatcaaattcatcgcgtgtgccgatgacgatatcagactgctcggcaaccaaagaataataaacggctgtttcatctgatgactgccacgtatatggccggtaatccagttcgaataccaccttaacctgatgctttttcgcgtattgaacagcttttaacaccgcttcccgtgacgggcttttggcgagcgctgtcccggagacaagcagcattttcgcatttgcgatatagtcctcacttacctctgaaggctcaagataaagatccgccacatcatcgcgatacattaagatgctgcattcttcagggctgaggatttctgtaaatgcaaggcctgctttgtgtccatcttgatcaacaatcatctgtgtagtatccacgccggtctttctcatataggactctatgaatcttccatgctggtcatccggaattttgccgatgaagcccgcttttaagccaagcttcgcgctgccgatcgcgatattcgcaggtgaaccgccgacatatttcgaaaatgtcatcgtttcttccattgggcggttgtattcgactgcgttcagatcaatacatgcccggccgatggcaacaatatcaaaagccttctcttcattgaatgtatacttcatcgtaaacagccactcctcacttgttagcgttctaaaatccattcatgcgccgggtcgttataaaacttccattttcgcgtcggccctgccatgacatttaaatagtaggatgtgtatccgtccggaacgcctaccgggtggtatcccgcaggaacgatgacaacgttttcatttcccacagtcattgtctcgtcaatagaacggtcatctgtgtatacgcgctgaaacacaaagccctgtcccgggtctaactcatggtagtacgtttcttctaagaaagattcttccggcaagttgtcttggtcatgtttgtgaggcgggtagctggaccagttgccgctgtctgtatagacttcaactactaatagactgttagctgaagggtctgaatccggaagaatgttatgaacagtacgtttgtttgaaaattgcccgcgatgctcaattccgttgtcttccgctttgatcagctttgtcggaagctgcttttccgatggagaatagcaaagcgccactcttgcgtcgctgaccgctgtgatctcaaatgcacggtcatttgaaatatagacgctgtctgtcggttttcgttcaaatacgctttcgcgcgtgccgatattctcaaaagtcgactcatgatctgtcactgtaattttccccgttaccgccacaatacagatttcttgttttttcaattcttctgtatagcttgaacctgatgcaagatctaacactttaaactctacataagtgagatcagagttggatgtcgttacttcgtgcacgagtttgaccccattagacacttcatgcgactgcggcttacgcaacaaataactcatagagaagccctcctctttctattggcagaatgagtccgaacagcgcacatggacgccgttcggctgttcgtcgtttagttgaaatcaggtgccggatatcttgccgtcaccacttttttacgtgtatagaagtcgacgctgtcttttccgttcgcatgcagcgttccaaagaatgaagatttccagcctgagaatgggaagaacgccattggagccggcacaccaaggttgatgcctagcattcccgcatcaatgttttcacggaagtagcggattgcgtttgagttggatgtgaacaagcaggcgccgttcgcaaactcagacttattggcgatttcaatcgcttctttcaggtttttcacacggatgacagataagaccggagcgaaaatttcatctttccagatcgtcatttctgttgtgacattgtcaaagatcgtcgggccgacaaagtagccgtcgtcagacacattttcacgtccgtcacatacgagtctggcaccttcttcaagacctttttcgatatagctgagcgtgcgcttcttgttgtcttcgcgaatcaccggtcctaagaacacgccgtcatcaaggccgttaccgattttaatgtccgccactttttcctgcagcttcgccataaattcatcggcgattccttcttcaactgtcacaaccgcacaagccatgcagcgttcaccggcagaaccgaaggcagctccaacgatgtttgtaaccgtgtcttcaagattcgcatcgttcaagacaatcgtatggtttttcgcgccagtcagagattgaacgcgttttaagttttcgcttccttttttgtagacgtattcgcctactggcttggagcctacaaatgaaatcgctttaatttcgggatgctcgaggatgccgttcacaacgtcatgcgcaccgtatacgacgttgaacacccctttcggaaggcccgctttttcaaaaagctcaaccaatttctctgttaacagcggagtccgctcagatggctttaaaataaatgtgttgccgagcgcgatcgccatcgggaacatccagcaaggaaccatcatcgggaagttgaatggcgcgattccgccgacaactccgattgggtaacggtagttcgccgcttcaacgtccgttgcgatggaagcaagtgagtcacccatcatcagggaaggtgctccagcggcgaactctacgttttcaatcccgcgtcccacttcacctaaagcttctttcgtgttttttccgttttcaatggtaattagatgagcaagttcttctttatgctgagacagcagctgctggaagttaaatagaattctggcgcggcgaggaaccgccacctttgaccatgttttaaatgcttcagccgctgtttgcgctgcgtaatcaatatcctcttttgtagaaatcggcacttggcatagcacttctttcgtcgccggattgacgacatcttcatattgatctgttttgctttcaacccattcaccgttgatgtagttttttaattttctgatttctgccattcttattgcctccttcattagtaaacacatacacttgtatggatggttccggatagattcatatcaatatccacttttcagcaagccaagaattaaacgctttcaaaaacaccaaaaaaataaatggcggatgcatatttacatacaagcaaccatttcatgcacaacaggttactttttggtcatttcttggttatattctaatcgcataatacccataagtcaatcataaacactacattttttcattatttttattatattaatcttttaatcaagtaagagaagtaagagaaggccgtccaatcttgcaaaagatatacaccgatgttatcatttttaagcaactattgattaacttttggtttttattatatatttatgttacgtaaagattcaagaaggagttttttatatgaaactgatgcggattcaggaaatggaggagtacattttatcgcatggcactgtttccttagatgagctgtgccaggtgttcaatgtctccaaaaacacagtcagacgtgatatcaacaagctaacagaaaagggtgcgattgaaaaagtatacggcggcgtaacatctattgaaaaaaccgcattagttccttttgaaaatcgcaccattcagcaccaggatgaaaaaacaaaaatcgcccattatgcttcccgatttattgaagatcacgatttggtcttcattgattcaggaacgacgacaaagtctattcttgatacgcttgatccagccaaaaatgtcaccatcttaaccaacagtttagacattatcaatgcggcgtcagctttgaagaatatcaacttaatcattatcggaaacaactataagagaaaaacccgctcctttgtcggcatggacgacccggctatgcttgataagtacaatatcaacaaagcctttatgtccgctaccggaacgacgctgactcacggattgaccaattcggatctgctggagtatgaaattaaaaagaggatttcagaaaaagcaaaagaagtgtatctattggctgaccattctaaattcggaaaatcaacgcttctgacgtatgcaccgtttgacaggctgcattgcattgtgacctctcagccattagacgacgagtacacgcagtactgcaatgagcatcaaatcggcattcatctggcctaacgtttacaatagtgttgagagtctatcatccattttattctaggaggcagatcatgaaaaaagcgaagctcggaaaatcagacttgcaggtattccctatcggattaggaacaaatgctgtcggaggacataacctctacccgaacctaaatgaagaaaccggaaaagaattggtgcgcgaggcgatccgtaatggcgtgacaatgttagacaccgcttacatttacgggatcggccgttccgaagaattaattggtgaagtgctgcgtgaattcaaccgtgaagatgttgtcatcgcgacaaaagccgctcacagaaaacaaggcaatgactttgtctttgataattcaccagattttcttaaaaaatcagttgatgaaagcctgaagcgcttgaataccgattatattgatttgttctacattcacttccctgacgaacatacgcctaaggatgaagccgttaacgcgctgaatgagatgaagaaagccggaaaaatccgttccatcggtgtatccaacttctctttagagcaattgaaagaagcaaacaaagacggtttggtagatgtattgcaaggcgaatacaacctgttaaaccgtgaagcggaaaaaacattcttcccgtatacgaaggagcataatatttcatttatcccttacttccctctcgtatcaggtttattggcaggaaagtatacagaagatacaacgttcccagaaggcgacctgcgaaacgaacaggaacacttcaagggtgagcgtttcaaagaaaatatcagaaaggtcaacaagcttgcgccgattgccgaaaaacacaacgtggatatccctcacatcgtattggcctggtatttagcaagaccggaaattgatattttaatcccaggagcaaaacgtgccgatcagctgattgataacatcaaaacagctgacgtgacgctttctcaagaggatatttcatttattgataagctgttcgcataagaagaaaacagccttctccaatggagaaggctgtttttttgtgcgataaattcctaaataactgattttgaagcaaaaccttacaaaatgagccataaatccgataaaataaaggtagtttatctcagaaagaaagtgattgagaaagcaaaagtatgaaacgttcatatcatctagctcatatgaaataaagctgacccagcttcttttatttgctggtcagaatagcggaccgtttcgatggtctatggaggaaacagaatgaaacttaaatatgtaaaagccttagttgcagtaaccgttgctttaggtgtactgctgccatcaacgatttctcatgcaaagagctttagcggccgctcatcatctagttacagcagccgaagttcaagctcatcatacagcggaagctataaatcaagcccgaaatcaagctacagctcaggatcaagctcttctagcaaaaaatccaagacgtctgacgattcatcatcatcgatttcgcttaaaaagaagccttcggaaaaggcaagttcatcaagctctaaaaaatcgtcaggcaccttttccggcgctacatcaaaagtaaccggaaagacatacagcggaaaaacgtctaaagcctatgttggcggacgttatgtttcagtcaatcattactatcacgcaggtttcgcgccatcaggatggtttggatattatagcggatttacaatgggtatgttcatgatcagcatgatgcacccatggggttacacctatcatccagtcggaggccccggttatgtttcttatggcgcttcacccattgcctggatcgttgatatcatcgctttgattattattttaatcattgtcatcgcattgattcgcgcatttaaagcaccgaagacgtacagaaggagattttaggcaatgagattaatattaaatgagcaagaaattgtagacggaatttgcgtgtatatttccaatgaagaagatatctaccctgaagacgttgaagtaaaagaactatcgtacaacaagcgtacagggttcttcgctgaagctacatttggcctgcaccacaagcagcttatgtcagatgacatttcagaaggcattattcagttcttagaggaataccacaacttcaatccggacgttaccgtcgttgaattgcaatttgataagaaaaaaggcttctccgccttggtttttgtcaacgaagcagaagaataaaaatgtcttaatcaaaccttactccgcgcgggtaaggtttttttaatggtttctctgagcataaagttatttcgtttttcctaaactcagcggatctgtgatcatctcttttggctataaagtttccgttttttcaaaacaaatgtttcaaatgagataggaaatgggtactaatctattaactttgttacatatttttagatactcattggctcaacaactgaggaggagacatttgtgaagaaagacacaaggaaatatatgatctactttttcggcgctttagggggactgctatatggttacgatacaggtgttatctccggagcactcctgtttatcaataacgatattcctttaacgacattgacagaaggattggttgtcagcatgctgctccttggcgcgattttcggttctgccttgagcggcacatgctcagaccgctggggcaggagaaaggttgtatttgtcctttccatcatttttattatcggtgcgctcgcttgcgcattttctcaaacaatcggcatgctgattgcatctagggtgatactcgggttggccgtcggcggttcaacggcacttgtgcccgtgtatctttccgaaatggcaccgacgaaaattcgcgggacactcggcacaatgaacaacttaatgattgtcaccgggattttgctcgcctatatcgttaactacctgttcacaccgtttgaagcgtggcgctggatggtcggtctggctgcagtgcctgccgtgcttctattaatcggcatcgccttcatgccggaatcgccaagatggctcgtgaagcgcggcagcgaagaagaagcgagacgcatcatgaacatcactcatgaccccaaagacatcgaaatggaattggcagagatgaagcaaggggaagcggagaaaaaagaaacgacacttggcgtgctgaaagccaagtggattcgccctatgcttctgattggcgtcggccttgccattttccagcaggcagtcggcattaacacggtcatctactacgcgccaaccatttttacgaaggccggtcttggcacatcagcttcggcgctcggcacaatgggaatcggcatcctcaacgtcatcatgtgtatcactgccatgatcttaattgaccgtgtcggccgcaaaaaacttctgatctggggaagtgtcggcatcacactgagccttgctgctttatcaggcgtgctcctgacactggggctttccgcatcaacagcgtggatgacagtagtctttctcggtgtctatatcgtcttttaccaggcgacatggggtccggtagtgtgggtgctcatgcctgagctcttcccgtccaaagcacgcggagccgcgacagggttcacgactttggtgttatcggcggctaacctgatcgtgtcgcttgtcttcccgctgatgctaagcgcgatgggcatcgcatgggtctttatggttttctcagtcatttgtcttctctcatttttcttcgcgttctacatggtaccggaaaccaaagggaaaagcttggaggaaattgaagcaagcctgaaaaaacggtttaaaaagaagaaaagcacccaaaaccaagtgctgaatgagcgtacattataaaaaaaggaatcgtctccttatgagacgattcctttttctgtttacaccatgaccttgcaaatattgttcgtaaattccacagggtcctgaatcggcaggccttcgatgaggagcgcctgattgtacagaaggtttgtgtacaggctcagcttctctttatcttgttcaaacgcgtcctgcagtgtttggaatacctcgtgatttgggttgatttccagcactttttccgccttcacattttggctgtcaggcatcgcatttaagattttttccatctcaattgtcacttcgccgtcagcagcaaggcagactggatgtgatttaagccgttttgagattctgacgtttttcactttgtctgacagaatgtttttcatttcctcaaacagatccttatacttgctttcctcttcctcggactgcttttgatcctcatccgtgtctatgccaaggtctccgcttgatacggacttgaattctttttcctgataagaagccagcattttaattgcaaactcatcgatgtcctcagtaaagtagaggatttcatagcctttgtccgccaccatttccgtttgcggcagtttctcaatgcggtcgtaagaatcaccggtcgcgtaataaatgaatttctgctcctctggcattctggaaacatactcgtctaagctgaccagttttttctcttttgaagagtagaataagaggagatccttcaattgatccttattcgcgccaaaatcattgtacacgccgaatttcagctgtctgccgaacgacttgtagaacgtctcgtatttctcgcggtcttttttcaacaggctttgcagctcgcttttgattttcttgctgatgtttttcgcgatcagcttcagctggcggtcatgctgcagcatttctctggaaatattcagcgacagatcctcagaatcgaccatgcccttcacaaagctgaagtggtccggtagcaggtctgcgcacttattcatgatcagcacgccattggaatacagctccaagcctttctcatattccttggaatagtagtcaaacggcatgttttcagggacgaatagaatcgcgttgtagcgaaccgctccatccacgctgatatgaacgtgtgtcagcggtttatcaaacccgtaatgcttttcagcatagaatttttcataatcctcatctgtcagctcgcttttgttttttctccagatcggcaccatgctgttgaccgtctgctcttcctgcacctcttcaaattcattttcgctgccttccttcggcttattaatggttgtatccattttgatcgggtagcgaatgaagtcggagtacttcttgatgatcgcttttaaacgatattcctctaaaaactcgtcatagctgtcatcttctgtgttctctttgattttcaggataatgtctgtaccgacagaatccttttcacacggctcaatcgtatagccgtctgcacccgcagactcccatttataagcctcttcgctgccaagcgctttactgatgactgtcacgacatcggcaaccataaatgccgcgtaaaaaccgacaccgaactgcccgataatgtcatgtccgtctttcagctcgttttcctttttaaacgcgagggaaccgctttttgcaattgttccaagatgctgttcaagctcatcctttgtcattccgatccccgtatcagagatggttaatgttctcgcatctttgtcagctgcgacctttatgtagtaactgtctttatcaaacgtaagcgcatcgtccgtaagcgctttgtaatagattttgtcaatcgcatcactcgaattggagattaactcgcgcaggaaaatttctttttgggtataaatggagttaatcatcatatccagcaagcgtttagactctgctttaaactcttttttcgccactcttgatcgctcctttaccattatgtaaacccttttcagcatctatttatcacataagatgacaattgtcaattagattgatagatgcatatatatgtaaatttaacattagttggatttgttttcactctttttctcactcattctcataaaaaagagaggcttcatcatcctctctttttttctgtgtcattccaacggccaaactcccgcttcatccatatatgcaccgggtagaaaaacaaaccgaacggtatcaaaaacaaaagattatgccatgaagcattcagaaatgcgcttgcagtcaccgggaacgtaatctcttgcaataaaaaagagatgacagtcagcacaacaaatgcagatggaatggtcacgatgcaataaaacttgagctccttcttatgctgtaccttcaaacatacaaacctcccaacaatttctaattcatcttaacatatgctggcctttcttttctcgcatgtttatcactgcacatagcgggaagacaaatagaaaaaggaggtctcgtatcatgggaagacttgaaaacaaaacagcagttatcacaggcgccgcgacaggcattggtcaagcgacggcggaggtttttgccaatgaaggcgcgcgtgtgatcatcggagatatcaataaagatcaaatggaagaaacagttgacgcaatcagaaaaaacggaggacaggccgaatcctttcacctcgatgtgtcagatgaaaacagtgtgaaagcatttgctgatcaaatcaaggatgcatgcggaacgattgatattctgtttaataatgccggcgttgatcaggaaggcggaaaggtgcacgaatatccggttgacctgtttgaccgcattatcgccgtcgacctgcgcggcacattcctttgcagcaaatatttgattccgctcatgctcgaaaatggaggctccatcatcaacacctcctccatgtcaggccgtgccgcggaccttgaccgctccggctacaacgccgcaaaaggcggtatcaccaacctgacaaaggcaatggcaatcgactacgcacgaaacggcatccgcgtcaattccatttcaccgggcacgatcgaaacaccgctgattgacaaattagcaggcacaaaagaacaggaaatgggcgaacaattccgcgaagccaacaaatggatcacgccgctcggacgtcttggccagcccaaagaaatggcaacagtggcactgttcctcgcatcagacgacagctcatacgtcacaggagaagacatcaccgcagacggcggcatcatggcgtacacatggcctgggaagatgctgattgaggagaaatggaaggaagaaacgaaataagagagggagccccctctctttttgtcttttaaagcaatacaaccttatatttcttcacatccaaaaactgcaaaaactccctcgccagcacttcaggcggatgcgcctttccttcatccagccgatacaaaagcaacccgataatcattgcggatacataatgggcataaagctttttctctgcgtgaatatcagtttgctgatgcagataaaacgattccagcgctttgaacatatcaggtatcacatgaggaacaccccattcccgattgagaaaatggacaatgggcatgtttgacaaagcagaaagcagaatggcgagcgccttctccgcttcctttaaggaaaattcattcgggctggaggcaatcgtcaggtgatcaatgatctccgcacatgatcgctgtatcatggtttggagcaattcctccttattggcatagtgatcataaaaggttgcacggcggatattgcttttacgcgtaatatctgaaatcgtgatgcccgcgtagtcttgtttctccgccaatacatccagaaatgccttctgcagcgcctctctcgttcgaaccacccgcctgtcgatttgcttctccttctctcgctctcctggcacagcttttccaaacagccaataaaaccgcttttgagaaacaagctcccataccttctggctgatggcttcaggagacgcggccgcatcctcattcagccaatacaggataatcgcgtacgtgtacaaggcccgataatgtccataaatgtcccgttcaatcggcgttaaattcacatggatcggagccagcagcacatcctgctgaaacacatccttaaaaaaacgatgaaaatgtcctctgttcatcatcacagaaaaaaaggaacgatgctcatgaacaaaggacagcgtcggatgcaccgtttgccgttttttgttcaaatgaagggtatccatatgactgaaggcgtcaaaaagcgctttgcccagtccttccttcatgtcttcgatcacatcctcaatgattgaaaacttatcctcataataaaggtagagcgatccgcggctcactttggccttctcagcgatttctttcattgtgatgtgttgaatatctctatctttcaataaagccagcagcgcctctttcacttgagcttcggcagattccggcacaaaagacacctccaatcattagacagatcttagatatatgtacggtaacgtatagatggttcaccgttgtctttcttacagaaaaggtaccaccttataataggtccgagaaaagaagaaagcaaatgagggggattttacaatggaacagcaagtaaaggacgacatccagcgtgtctttcagcttcagaaaaaacagcaaaaagccttgcgcgcttcaacagcggaacagcggagagaaaagcttcaacgctttttagattccgtcatcgcccatgaagaagaaatcatcgaagcgatccgcaaagacgtccgcaaaccatatcacgaagtcaaaaaagcggaaatcgaaggaacaaaaaaagcgattagagataatatgaataacctggaacaatggatggcgcctaaagaagtcggttcatcgttaagccctgacgcaaacggaattcttatgtacgagcctaaaggcgtcacactcatcctcggcccgtggaactatccgtttatgctgacgatggcgccgcttgccgcttctctcgcagccggaaacagcgcgattgtgaagctgtccgatttcacgatgaacacgagcaacattgctgctaaagtaataagagacgcttttgatgaaaaagaagtcgcgatttttgaaggagaggttgaggtggcaaccgaactacttgatcagccgttcgaccatattttcttcactggaagcacaaatgtcgggaaaattgtcatgacagcggctgccaaacacttggcatctgtcacacttgagcttggcggcaagagcccgacgatcattgacagtgaatacgatctgatggacgcagcgaaaaagatcgccgtcgggaaattcgtaaacgccggccaaacctgcatcgcacctgattacctgttcattaaaaaagacgttcaggacaggttcgcggggattttacaaacagtcgtcaacgctggatttatggaggatgatcataccccagaccgcagcaaatttacgcagatcgtcaatgaccgcaacttcaaccgcgtcaaagatctgttcgacgatgccatcgaaagaggggcggaagtggtgttcggcggcgtattcgatgccagcgaccgcacgatctcgccaaccgttttgaaaaacgtcacgcctgacatgaaaatcatgcaggaggaaatcttcgcatcgatcctgccaatgatgaactatgaagacatcgacgaggtcatcgattacgtaaatgaccgcgataaaccgcttgcactttatgtgttcagcaaaaaccaagatctgattgacaacgtccttcagcacacgacatcaggaaatgccgccatcaatgatgtcgtcgtccatttcagtgacgtcaacctgccattcggcggcgtcaacacaagcggaatcggctcctatcatggggtatacggattcaaagagttttctcatgagaagggtgtatttattcaggccgctgaataatcgcatgatcaaaaggcgcttccttagaggagcgccttttattgtaactccttgaccaaaagcaattcatcacggataggtattttattatctgccagtaaaggaatttcgggcttcatctttctggccgtctcgactgcattcacaaatagtcgatccaaccggtaccctctcttctgataaaacgctaatgcatgaatattatcattggttgtgatcagttttatttgtttgatatttctctctctgcatgcttcctcggctttctctagcagagctgttccgatccctttattctcaatgacactatccagcgaaatgatttcacaggcatcttcttcaaatatgtatgtaataaggccaacaatctggttatcatcgttgagcattccataaccatctaattcatcgcagttataaataccgctagaaataaccatttgcggactgccccagtgtttttgaaaaaacgcggaaacaagatctttaggtatctggcatgtcggaataatattcatattttcctccttttagctgaacaaaaataagagaattaacaacctattttatgtcattaatccccttatctagtatttactagaacttataacttgtcaaaagctgtctgaataccaattgcgtggattgataaggatcaaaatctgaatcctgagattggaagatttgctctggggtcaatgtctctgcgttctctgataacgtttgaatcagactttccaaatatccatttaactctgatttggacgattcatgtagggattgatgatttacagcgagttctctaaatctgttatcactgattaatttttttcgaagagctgctagcatcaagtcaagccatgcaggctggccaaatgtaatatttaaagctaacgttgcttgatcagatttggtggagtgccataaacctcttggcaaatacagcatggttcccggtgttaaattaacgatttctgcatctggcagatcctcttttggcggatctcctttccaatatgactgtaaatcatcaggatagtaaggagcctctgataaatcatagtgctgcattggattgctcacattttcattcttggcaagcttccatgttttctcaccttgaatttgaaaaatcaagttggtgtaggcgtcaaaatgggctttgaatcccccgccatttttcgccgcgtaaacaatggctttggaagaagtacccgcaggcagtcttaattccgctttgagtttttctatccaccttctgacttggggaataaataggtcggtgaaatcaaactctaatgcagcccctttttcataccactctaaagcctctgcaggtgacacaagaaatctgtctgtgatcccttcagattcttcaatcacagcatcaccaacgaccatgactggattattgtagatagccaatacgttttctagcgttctaaccttttcaaaccccggtatgcttgtaaatctctccacttctcctctggctaccaaaggttttacaggccaatattcttctaaaaactcactcatcgttacaggactgatgatagactccaaaaccgattcggttacagcactcatattatccctcccaaaaaaagtaacttcaccacaaagatataacatttttttctaaaagtaaatattgacagaattatcagaggattataatatttagttgtgcgtgatagcctatttttttacaaggaaggagggaaaaggatgaaaaaggcttataagaaacctcgtctttttgaactgcgccgtgctgtagcagctggcggccattaatctcatatagcatttgacatctagtactctattttaggagggatgctcaatgaaaaaagcttataagaaacctcgcctttttgaactgcgccgtgctgtagcagctggcggccattaatctcatatagcatttgacatctagtactctattttaggagggatgctcaatgaaaaaagcttataagaaacctcgcctttttgaattgcgccgcgctgtagcagctggcggtcattaatcttatccaaaacgattaacgtttgaggctatcacgccaacttgataaggaggatgctgaagatgattacggctgaagaatgcagaacgtacaaagaatttgttgatctttaccaatcctatctttaccccttgcttggcgccagactgtcccggatgtattcccccaaaaacaaagtcattatcgatatgggcacaggtccaggttatttaagcattcagttggctaaaagaacaaatgcgcacgtgcatgctgtcgatattaacccggccatgcatgaaatcgctcaagaagaagctaaaaaaagcggagtaagcagcctgatttcatttgatttggaagatgtccaccatttatcttacgctgaccaatatgctgacttcatcgtctcctactcttgcctgcatcattgggaagacgttgttaaaggacttaaagagtgctatagagttctggctccgggcggaaaaattgtcattttggatacatttaatccccaaggaagccatttagagattatgcgaaaacaaatcaaagaaccggaatacttcaggtttgtaagagaggcatttgaagaaagttattcctttgaagacattcaccagtttgttcaggatgccggcattcccaattattcattagaaacctttcactttttaccggaggattttatagaaagcttagatgagctggaggatgctcccctgtgggaacaaaatgatcaaagtactgatcatgaaattgagtctgtcacatggatgttaacgatagaaaaagaaaaggaaggtgcattgtaatgatcaatgaatcaactgttttatccaaaaatccagaaatgccatcaagaaaatatttgaaaagcattattatagagccgggcatcactttaaatgaaatggcatcagatatttataaccatatcgacggcaaggtcagcatacatgatatttgctcaaaaatcgtcaatgaatatgatgttgattatcaaacctgcttagaagattgtatggagctgtttgagttgcttattgatcatgaagcaatcaaagttaagcagggggcatgagaattggaaaaacaaaaagtgcttgctttaccagacgatgtacatgagctgagtacacaccgttctaaatcaatcgtaaattacatcatcactctgcttgcctttgccaaaaaacaaggattgactcatcaagatattgtaagctggattcacgagcaatatgaggaaagaggatattatgatgagtggagacacattaacagccaacaaccagttggatcatttgtggaactctttataaaaggaagacgtttactttatgacaaaattgaattgtttgaaacagaagataaatatgtcgtaaatacccacacttggtatgaaaaagaacctagtgaggcctttttttattttgaaattgatcccgaagaattttctgcgtacgcttccattctcgcaatcgaaaacgcaaaacgtctcggaattaaaatcgatattgtaaaagaaacagatgtagagacagcttatatctataaacatcaataacgctattgggagggagacatatgtgcgggctcgcgggtattataaatctggctgctccccgttctcaggaatgtacctttcatatattgaaaggcatggcagatgccatcagctataggggaccggatgatgaacaatatcatattgattccaaagtcggctttgcatttcggcgattgtccattcttgaccttgtaaatggacagcagccctttttaaatgaggatggatcaatcgtcgttatggtaaatggagaaatttataactataaagaactgaaggcttctttacacaatcatatgtttaaaacgacatctgattgtgaagtaattgttcatttatatgaagaaaaagggattggatttgtagacgacatcatcggaatgttttcaatagccatttgggacaaaaataaaaacaaagtatttttagttcgtgaccgctttgggattaaaccgcttttttacacagagctaaaacacgagcttatatttgcctctgaaataaaatccctattttctcatcctcactgtccccgccaatttaattggaaagaagcactctcagacatttggctaagcggggaagcagccagtaatcataaagaaaccacttccttttttgtaaacatccaaaatctcgatgctggccattatctcgaaattaatttgacaacaaatgaacgaaaaacagcaagctattggtctttacaggatattttgctcaggcaaggctatcgtgagaatctccatcccgatgacctgattgaaggatatagagaactgctggcagattcagtccatagatgtttacaaagcgacgttgaagtcgggttgtttcttagcggtggcattgattcagctgcagtcgcacattttgctgcagaaaaacaggatctccatacgtttacagtattaagccaaagtacatttacaaatgaagatgcaaaatatgcccattggctggctaaagatttacaccttccaaatcatcaggttctctatcaattagggaacgatgagttattacaaccagagtcatataaacatttgttatggatctgtgaaacaccgttttgcggaccggaacaattatataagtttcatttacataagtatgccaaagcgataaggccaaacctgaaagtcatgctgaccggccagggcagcgacgaatttaacggcggttacagcacgacactttcaccagccgagaacccaagttgggaaggatttattgaatcggtcaatacgatggagatgaaccggctgcatcggctgcagggaaatatctttagagtgtgggaggagcattttggactttctcctataaacctttcttatttaaagagcaatgattccagccaagcagatccttggcaatcgtatgtcctgacaaaataccgtgatctgcaaatgtataattgctggcatgaagatcggatcgccgcggctaatcatatcgaaaaccgtgtaccgttcttggaccatcggcttgttgaatgggtttgcggaatacctgatggactccgtaaagacttgttatgggataagtcggtattgcgaaaatcattaacaaatgagctgcatacaagctatacccaccggccaaaggttccttttttctatggtaaggacgtgagatatacacataaaatgatgtttcatcttctgaagaaaaacaattatcagcttatagaggaggccttctctcacagcgatgcctccagcataatacaggttgaacacattcatgccatcatgacatatttggaggatgatcctgagtttacaaattttgaatttttattaagactggtgaacatgggacttttatcaaaaatgactaaagaaaccccttctgttcaattagacataaccagccatttagaatcgataacaataaaagactggcactcacaggaaggtgatattgccagtcgtttaaatatctcagccaataagtgtgaaggacaagatattttggcgctaaaccctggcgtcactctgttaaggccggaaagcgatagtgagcattgcatctacattgcggaagaaggatttattcagtttattgtttcggaggaagacgtcggagcttggctgcatattctctgcgatattaatggaaaagacacacttcatacgattttagacagacatggtgtcagccttgaagaagtggccaaatatattcaagaagccatcgaacacaatatcattttgatcaaacaaaaaaatctgccagaaggagcatatagatgagcatcttttattcgttttccgcacttaggggattagcaatggggattttttcgcctatttggattctttatctgatatctaaagattatgatttccttcagattggattaatgggagcggtacttgaaattgctaagcttatatttgaagttccttccggcgtttttgctgatcgttatggaattaaaatttcaattgccagttcattctttttctccatccttacatgggccttcttcccttttatcgattcagctgctatttgcatactggctatgatcatatgggctttatcagattccttaatttccggttcttttgaaacttggatgagccgtgtcgcaggggaagatcgattcggcaaagaaatgatgaaaaacacacaattgctaatcacttttttaattattggaagtattgccagcgggtatttgtattcattaaatatctattttcctttcctgctcgttatggtgatctacttattactatttatttggatgtctgtatttattaaagtcccttctgtttccgaaacaaatcatggggatcagaaccaacatgattcgataaagattatcaaagaaagtttaaaaattatctttaacaaaaaaagggttcttttaatcgtcatagccggtttctttacagccacagcctatgacacaatttcccgttactggcagccttttttgagtgatttaggcttttcagaaaagtcactgggatatatttttgccctaggagggtttaccgctctcgttcttttgacattaaccatcaggttcgaaaagaagatcgaaaaaaatccatatctcgctttaacctcattggattccatgggcatggtcatgacttttctattgtctagagcattcaggccgctgggcattccatgtacagcgtttttgcttgcaattgaagatattcatcatccgatcgtaacaagttacttaaataagtttttccccgattcatacaagaacacacttttctcgttaaactcaggggtaggagcaattggagaaattctttccggtgtcattttcggcatcatttccgcagcctttgggctctctgccatgtttgttgttgtagctgtatttctattaatccctattatcctttatacgatagtgcctaagattaaagacaatgatatgaaagttcagattgaaaaatcccagcaagtgtaaatgttttgtatcacagtaagaagaccttcttattaaaagaaggtcttctgctattctattcagttatttcccaaaagccatcagcttcgtataacttccaatataaagtgttccgtcctcagcgagctgaggagaagacacgacgttgctgtcggtttgatagctccataattcattgccgtttgcgtctgccgcataaaccttcatatcatctgacccgaaataaaccgttcccttcgcgtcaatcagcggcgccgttctgacagggccgtctgtgtagaatgaccagttcatatccccgtttttgctgatggaaaacagctcgccgcttcctgagccgatgtagatattgccattatgatcaatcgcaggagatgagctggagaacccgtttagcgggaatgtccatttcaaactgcctgttgatgtataagcatacagctgtccatcttggttgccggcataaatgtttccgtccttatcaatcaccggatatcctttaaacgcatttgacgtcgttctggaccatttcacctgtccggttccggagttgatcgcataaaacacgtaattatatgtgccgacatacacggtgccgtttttggcaagcaccggcacagagctgacgaccccatttgttttcaacttccagcgctctgtccaggttgattttgacgtcggtttgatcgcgtgaacataattatcaagtgttgagaaatacaacgtcccgtctgaaccgatcaccgtttcagagcttggcccgccgcttaacggaaccgttgttaaaatttctcccgtttctttgtcaataaaataaatctttttgtcataggatgccaaatagataacgccgttggtcccaagtacaggagattgcgtatatgtttttccaagattgcccgtcacccatttgactgagccgtctggattaaaggctttcatttccccgtctctggaatgaagatatactgtgccgtctccgtcaatcacagcccccgctccattttgcggagtcgttctgatgtcgttttgccatttcagcgtcccgtctgtatttccggcgaaccggctttcgcgtgaccagttaaacatggcaggcgccatcgcttgtacatcatatcttcctggcaaaaagccagatgctccattattttgagaaaacaccgtttccgccgcataagcagctgtcggctgaagcactttggcagcgggcacatcagaaacagcgccggccgaaacagccgccgccaccgcagctcccgcaatcaaagctttcatacgaaatgacttgaccatcattgagacccccattatatgtaacttctaatttgtgaccatcataacatattcatccattttataaatctatttcacaaaaacatcacaaactagaaaactatgtaagagtattcacggacgttttttcagcacccgatcgaaatgcagccacaaaccaaatgacgttgacagcagccgcagcgagactaactcccaaaacaaagatcacctcagaaagcagatggtcactaaagaaactaaacatcaagataaaaccggccgaagacaaatgaatcaaaagcccgaagccgcaaagcaccgccatgacatacctcattgcatcgactccgagcatataaacgagaaatggaatgaaatacaagacaaggatcataccgacagctgaccacatgccagctgaattaaactgattggccgccgctcccgttccggccagcggcgaaagtgaagccgccacaatcacggcgcaaaaaagaaacgcagaaatggttgtcatgatcgccacgctatttttttttgacatcaaactcctcctttaatagaaatattaaccttttttattataagtaagttgaatgttatattcattatatttttaaaaaattccagaatacatacacaaatgctatgcttctttctagtatatttatatagtaaaaaacaaaggataaaagactcatttttctgtaatatcaggattttatcaccataccatattgcatgtacatgtttttcaaagtatactattccagattaattcagaggagagagaaaaatacatggaaaaaccagcaggattttggattcgttttttagcttattttattgacggcattattgtatctgttcctagttatattattctatttattatcaattctgtgtttgtagctggggctgtggcaacaaacccttacatgacggaagaagagtatttagtgaaatacatgacgcttgcatttttgcctactatgctgatcatgatcgtcatcagcgtgttatattacgggctgctcacagcttctaaaatgcaaggcacacttggcaaaaaaattcttggcctgaaagtggtcaatgaacaaggtgaacgggtttctgtcggacagggaattggccgttactttgcctatatcttatctggaatcatcttttatatcgggtttatcatgatcgcctttggagagaaaaaaggcctgcatgacatcatttgcaaaacacgtgtcgtgtataaataatagaaaaaagtctagacgccaataggcatctagacttttgttttctttgcaataggctgccacgacagatacgtagcgcttctccacaaccactcaaacggccccatccgaaagacacgaagccaaaggtggctgaagaccatttgaacggcacaaacagcaattgtaatgagcacaccggcagcagggtacacttttccatacaggcccaagccgtaatgataaaaaatccaagtacacacaatagactgcatcaaataattggtaaatgccatcctcccaacagcggagaatgattgcagcactgttctcactcttgttttatgataaagatagacaaccgttgtaacatagaaaaacatgaggaaaggcgcgccaatcagcaaacatatttctttatccgttacactgtacagcacctgggcgccgatgccgatgacaagcccagccatccataatcgttttaatcctttgcgatgcttttccggttcatgcaaataccgtgattttgctgccgcagctcccagcaaaaacatgctgaaatatggaatggatgcaaagaagtagttgagcggattatacgtaagcatgccattcgaagacatgtaaacaagacggtcgtggatccgctgttctgcaatatccttcaggctgccgcttccataaacatgaatcgcttgttttgcctgctgtgttaccgcttgtacccattcctgtccgtttgattgatcaaaacttgtcaacatgaacggaatggaaaacagaagatacaaagagaccgcccatatcagcagtgttttcggctttgcttttcgaaacaagagcaggacaaatccgagcagggcatattctgttaaaatatccccgtcccatatcaaaaaggcatgaatcgttccaaacaagagaagcgccattaaccttctcacatataacggaacaaaccgtttccctttgttttctgctctctccatcatgacaaccatgccaaatccaaataaaaaggaaaacaataaaatacattttgtttgaatgaagaatttcagtatgtctgcggcggcaaaatcagcttcagaccacttatccatgaaaaaattctcttttccaagcatagacaaatacatatccggataactgaaatgtgccagattgacaaataagatgccgaaaatcgccattcctctcagcacatcaagcacaccgatccgctcatttgttaaagtcggctgtaatgaagacatagccatcacgctccttttttctgtaccttaagggtaggaaaaaatgaagcgcggtaacatcgatttaggtgtcaggccggcatgaaaaccttacaatcttgtcatctttatggtttcatcacctttaaatctaatgcttcgatattctgcaaaatgcgatcaaagcgcaaagcctgaggctcacatgggaagatgtggccttcatacgggtcgcctaacgtccggaaaaacggttcaaataaaccaggaaccaatacgcccaccatctttgtatagtgagaatcaaggcgataggagtgaacggtatttgcagggacatgcaggaaatctcccggattcagctgaatttcctggccatctgtccacatcgtcatctggccttcaaggcaataaaatgtttctgtatgatattcatggtagtgatcaacgattcggtcacctttagggccttcagatgatacgacgataaactggccatctgtatttttttgtgcagccacaatgcggtgaagctgatctccagtcaacagacgatctccttctccagattcaagaacgtatggaaccgctccatctggcagctctgtaagttccgctaatttggccgaacatgcaggctttgcttcatctagaaatacaatgtccgctacagcggctgcttctgcaaatcgctcgtttgagacttcttcgcttgcgtacggcggatgttcagcgtgatcatacggattcccaataacggaatacaagtgcgctacgtttcctttcatcgtgtaagacaccagtcttgttctgtggctctgcatccggtagctgtgcggtgttcccgccggaatgttggcataatcacctgatattaataaatagcgttcaccatcaagtgtcagttccagtttcccgtccaaaacgagaattccttcatgtgtgtccttgtggacgtgaagcggaaaggcatctccttttcccccggaaagaagcacgatctcaaacaaatcacctgtgctcctcccattcgccatcaccgtggcaacctgtctgccgaacagatagcgctcgccttctccgctccggagcaaataaggcattttttctttaggcaatgaatgtgtacataatgttttcatattatcgcttcctccaatttagaccagtctatatattatcattcatttgtctagaccgttctatataattgtaggagaaaggataacaaaatgctaccctttttttctcaccagcactggtatttgttcggcaatgagaagaagaggcgttttgtctttattcgttaacgaaagcatgatgccgccctcaatcatcgaattaatcagcgttccaagctgatttgcttcttcttctgcaaatccgttttccattaattttctggcaaaaaccgcttcccagcttttaaacaccttcatgcaaaccgtccgcagcggttcactgattaacgctgtctcactcgccagcaaaccgactggaatacctttaatgctttctgtgttgtcaaattggctggctgtttttttgataaaaagctgaatcgcttcaacaggatcagaggattcatccatgctttgctgtatcagatgttcaacgatcttacctgtatatgtaaccgcttcaattgctagttcttctttgccattcggaaaaaagtgataaagcgatccttttggagcaccgctttcttttacaatctggttcaaacctgtcgcgtgatatccttgcagctggaacagacgtgacgccgtgtgaaggattttttcacgtgaatctcctctgctagtcattaaaacattccctcctaggtatggtagagcgacttatataatataaaaaagaaccctgtgattgtcaaaaggggtaagacccttccggatggggtaatgtacaaaaacagcgtctaggagggatctctcaatgacaatcgatcattcagtcacaaatacagagcagcttgaacaacagaaccccgccataaaaacaaagctcaaactgaaaaagcttaaggatcaggtgatcgtcattaccggcgcttcaagcggtatcggacttgtcacggcgagaatggcagctgaaaaaggcgcaaaggtcgtggcagcagcgcgaaatgaagaggcgctgaaggagctcactgatgaacttaaggaaaaagggcacgacgccatatgggtaaaggcggatgtcggaaaagaagaggacgtcaaccgcatcgcagaaaccgcgatcagcacattcggccgctttgatacatgggtcaacaatgcggccgtctcgactttcggacacgccatggacgtcaccgtcgaagacatgaagcgcatgttcgacacaaatttctggggacctgtttacggaacaagagcggctgtcaaacactacaccggcagaggtgtgccgggcgcactcattaatgtaggaagcctgttcggagacaggggaacggtcattcaatccacatatgcatctgccaaatttgcgcttcacggctggacggaaagcatccgaatggagcttgaaaaggaacaggcgcccgtctcggtaacgctcatccacccgggcagaattgacacaccatataacgagcatgcgcacagctacctcgacaaacagccggctcattaccgctccatgatctatccgccggaagcggtcgccgaagcgatcctgtttgccgccgaacaccctaagcgcgacatgtacatcggctcacaggccaaagccatcgccatgctgggcgcgctttttcctcgtctgaccgacagactgatggaaaaaatcatgtatcacagccagcatgccgaaagaccgtccaatccgagagaagaaagcgctctttatgatgctggctgcggtatgcatgacagaggcacaaataaaggatggatgaggtcaagaagctactacacaaaagcgacgaagcgcccaattgtatcggcggctgttgttgccggactagtggcttgggctgccgccaaacgatgcagataatctctgaccataagaaaaacccatgctgttccagcgaaccatgggtttttcagctgttaatcgataaaagccttgttcatacgctgcagcagctcgccgaacatctctttttcctgtgttgaccattctttcagcatctgttcataacgttcaaggcgcttttgctgatcggcttttaatagttgtttgccgagttttgtaatggtaaacaggctgactctcccatcagacgggtctgagaaacgatagatgagctcctttgcctctaatgcagctgcttgtcttgaaagagtagaaatatcaagcttaaacgattcagccaattccttaacacgagcaggcccaaactcatccaattgtctcagtaataagtacgaagatctctccaaattccctgttcttttctccgattgatccagataaacagctctcctgataaaagtcgtcagctcatattcaattaattcaactggattttgattttgcaatcgctctcgctccctattccaatctccggcattgacaacatcatatatacttgtataatacaaatgtacattaactgaataaatacaagtcgttatatgactaaatcaattattatacttgtatagtacaatcatataaaaagaaagtaaagcgattcctcagaaccatcctagaagcaagcaccagaaaggaggaagctgttctgattggagagcagcacttgatgtgaaagtcatacgaattattttgcaagtgttgatattatatgtattttttatgatcggggaagccattcagcatctgtttcatttacccgtgtcaggaagcatcgttggattggtattgcttctgatctgcttgggcctccgtattgttcccgtctccatcattgaagacggagcagggtttttattatccttccttccattgttgttcatcccggcaatgacaggagtgataaactatccgtctctcatttcattcaatggcctgatgctgctgattacagtcgttctcagcaccatcgtcacgatcattgcggctggattcgccagccagctattagagaaaaaagcaaaaaaacgggaggagaaagagaaatgcagcaagcatgtatcgcgatcattataattcttttaacagttgccgcttatttagcgatggtcaaactctataagcgattcccgcttccatttctgatccctgttctgacaacgacaattttgattgtagcggctttgatgatgtttcatgtttcctatgaaggctatatgatcggggggaaatggatcaattctttgcttgggccggctgttgtggcgctggcctatccgctttataagcaatggcatatcattgtcaaacattgtgttcccattttaggcggcgtcctggtcggcttatgcatgggaatgatcagcgggctgatcttcgcagaagcattcgggattgatcatgatctcttattatccattctgccaaaatcgatcacaacccctgtcgctattcagatcgccgccggtcttggcggcgtcccttccatgacagtcgtatttgtcatgattgcgggcttttcaggcgtcatcctcgggccgcttttcctaaaatggcttcgcatacgcagctccctaggacaaggcattgcattaggcagcgcctcccatgcactgggtacctccaaagcgttggaatatggggaattggccgtatccatgagttccgtctccatgacgctttgtgcggtgctcggctcattcttcggcccgctcgtcgtctggctgtttcatatttaacaaagaaagactgccccgggggagggcagtctttttcgtttaagaagcaaaaaaatcaatcaacggctgaaagtccttagataaatcaacgtcattcggttctgcttgaagcaggcggtcaatcatacgctccagctcctcaacatcattcttatccgtatattcaatgaagtttaagctttcaagccaatcccgatatgaatgtttggctttgccatagctgtttccaaagacaaggcaaggtgttttggtgataatcgagaaaatcatcgcgtgaaggcggtcggtaatcaccaatttactggagccgatgcggtccagcatctccataaaatgcttttcacgatcagcgtaatcgatggtgtctaccgtatccagcaccgtatcggtacgctctgtgtaagttgttttttctgcccattgcttcatctgtgaaataaaatcttcgtcagtcactttctccttatccgctcttaaaataaagagaacgccgtcccgctcgagctctcgcggcacaatatccaaggaaagcaccatgtccggtgtaaagatcacattggagttgaaggtctctttcacaacatccagtgtttgcgtctcacgcgcagcaatcgttaagtttgtattttgatggtacgcatcctgtgtttttttcttttccttctgtccttcctctgtatcctcaaaataaacggattgtggcagagaaattgatttgtagtctttaaacgccgaaaagacctttcttctgtcttcctcaatatcgagataaaggtttcctaaattccctccgcctgtaaagcagacaatatcgtcttcacgaatgatctccttcaccagttcaatgccctcatccgtcgcataatccataatctcaatgtattcataatacggaaaatgatttttgataaatttctcttccgcatacgcaatcgcttggtcgccaatgtttgtgtagctaggggaaccaaacaaaaatacttttcgtttatcatttaacagagcttccggctccacatttggcgcaatgccttttactagttttttgcctttgatttcttgtacagtcatatctgcgtcctccttctgggatgaattcctcattgtgtgttaactgtctctacccaaaaagaaggatggctatgcattggcatgtgcatcggctatatcagaaacatcgttttcgccaatttgatagacgctgcaatgtcccgcgccgttctttccatatattccgcggcatgttcaaacgcgtcttctagtggcacggctccggggacgatgctgaaaagcgcatcgattccgtgttgatagacggcattactgtctcgggaaattgatcccgcaatgccgataacgggcacatcgtatgatttagcggccttggccaccccgatcggtgtttttccatgaaccgtttggctgtcgattcgtccctcgccggtaatcacaaggtctgcatcctgaacgatactttcaaaatcaaccgcttcaaggacaatatcaatgcctcttttcaggtcagcctgaagataagttagcaggctccatccaagaccgcccgctgcaccggcgccctctgtatctcggaaggttgatccgagcgctttttctgccatatcagcgaaatggcttacgttctggtctagtacatccaacatgtcggccgtcgcgcctttttgcggcccgaaaacagccgtagcaccctttggtcctgttaacggattgtccacgtcacaggcaacttccagtttgacattccgcaatctggaatcaagcccgctcacatctattgatgcaagctgagataacgcgccgccccctgggccaatctcgctgcctgagttatcaagaagccttccgcccaatgcctgaatcatcccggctcccccgtcgttcgtggcgcttccgccgattccgatgatcaatcgctccgctcccgcatcaagagctgctccgattaattctcccgttccccttgttgtagtgatgagcggatttcgcttatctacaggcaccagatgcagccctgaagcagcagccatttcaatcacagctgttctcccatctcccatcatgccaaagaaagctctcaccggttcccccagcggccctgtgacaacttgctctatgatccttccattggtcgcatcgaccagagattgaacggttccctcgccgccatccgccaccggcaattttctgtaatcagcacccggaaagaccgatttgaaacctctttctatcgcttcggctgcctccagagctgataagctttccttaaaagaatcaggtgcaatgatgattttcatccaaatcgcctctttcaaaacatgattcacttaacctattgatctccaatgtaccataattgatctggaaatacataccatgcaatatggtaaaaatttaaataaaaattagaaatgaaagtgtttgcataaaagaaatattcacgttatcatacttgtatacaagtatactccttgagtgaggaaggtgagtgtatgctagactccaaagacctgttgtatcccgcaaaatggctctcaaaagcgtcaaccggagttcgtgtcgcatacgagctgagaatgcggatcgtttcaggtctgattgaaagcggtaccattttatcagaaaatacaatcgccgccgagttttcagtaagccgttcgccggttcgcgaagcgctaaaaatactcgcatccgaaaaaatcatccgcttagaacgaatgggagcggtcgtaattggtttaactgagaagaaaatcgcggaaatttatgatgtgcggttactattagaaacatttgtctttgaacggcttgtcaaaatagacattgagcctttagttaaggatctcagcaaaattcttgaaatgatgaaagtctcaatcaaatatgaggatgctgacgaattttcatttcaagatgtgctgttccatgaaacgattatccgagcgattgatcattcatacattcagatgatctggaacaatctaaaacccgtcatggaaagctttattcttttatcgatgcgggtacggttaaaggaaaagtatgaagacttcacaaggattttagataaccacgagctttatattcaagccatcaaaacaaaggatagggcgctgatgattcagtctcttcaccaaaactttgatgatgtgcaggataaggtagaagacctatggctctcacaacaaatgctggcaaaaggagctgaatacaacaatgactagttatatgttaggaatcgatatcggcacgacaagcacaaaagctgtgctgttcagtgaaaacggagatgtggtacagaaagaaagcatcggctacccgctctatacaccggacatctcaacagctgaacaaaatccggaagagatttttcaggcagtcatccatacaacagcgagaattacaaaacagcatcccgaaaaacggatctctttcatttcgttcagcagcgccatgcacagcgtcattgcaatcgacgaaaatgacaagccgctgacgccatgcattacatgggccgacaacagaagtgaaggctgggcgcataagatcaaagaggaattgaacggacatgaggtgtacaaacggacgggaacaccgattcatccgatggcaccgttaagtaaaattgcctggatcacgaatgaaagaaaagaaatcgcttccaaggcaaaaaaatatatcggcatcaaagaatacatttttaaacagctgttcaatgagtatgtcatcgattactcattggcatcagcgacaggcatgatgaacctgaagggcttggattgggacgaagaggcactgcgcatcgcaggcatcacgccggatcacttatccaaactcgtgccgacaaccgagatctttcagcactgcagcccggaaatagcgatccaaatgggaatcgatccggaaacgccttttgtcatcggcgccagcgacggcgtgctgtccaacctcggcgtcaacgccattaaaaagggtgaaatcgccgtcaccatcggtacaagcggtgccattcggacgattattgacaagccgcaaaccgatgaaaaagggagaattttttgctatgccttgacggacaagcattgggttattgggggacctgtgaacaatgggggcatcgtccttcgctggatcagagacgagtttgcctcctccgaaatcgaaacagcgacacggctgggcattgatccatatgacgtgctgacgaaaattgcccaacgcgtcagacccggttctgacggtctgctgttccacccatatctcgccggagaacgcgctccgttgtggaatccggatgtacgcggctcatttttcggcttgaccatgtcgcataagaaagagcatatgatacgcgcggcattggaaggcgtcatttacaacctgtacacggtgttcttggcgttaactgaatgcatggatggcccggtaacccgcatccaagcgacagggggttttgcaaggtcggaggtttggcgccaaatgatgtcggatatcttcgaatcagaggttgtcgttccggaaagctacgaaagctcatgtctcggcgcctgcattttaggcctgtatgcaacaggaaaaatcgattctttcgacgccgtgtccgatatgatcggcagcacatacagacatacgccgatcgaagactcagccaaggaatacagaacattaatgccgattttcatcaatctatcaagattattagaaaatcaatatacacaaattgcagattatcagaggggcttaatcacacacaaatagtacatgacatgaaggggagggcattaccatgccgttaatcatcgttgcacttgggatcttagcattactatttctgattatgggcttaaaattaaacacatttatttccctgctggtcgtatcgttcggcgtggcactggcactcgggatgccgttcgataaagttgtcagctccatcgaagcaggaataggggggactcttggccacatcgcgctcatcttcggactcggtgcgatgctgggcaaactgatcgcggattcaggaggcgcacagcgcattgcgatgacgctcgtcaacaaattcggtgagaaaaatattcaatgggccgttgtcattgcctcattcattattgggattgcgttattttttgaagtaggactggttctattaattccgattgtctttgcgatttcaagagaattgaagatttctattttatttctcggaatcccgatggtcgcggcactatccgtcacacacggtttcctgccgccgcacccgggacctacggcgatcgccggtgagtatggcgcaaacattggagaagtgctgctgtacggctttatcgttgctgttccgacagtgctcattgcagggccgttatttacaaagttcgcgaaaaaaatcgttcctgcatcatttgcgaaaaacggcaatattgcatcactcggcacacaaaaaacatttaaccttgaagaaacacccggctttggaatcagtgtctttactgcaatgctcccgattatcatcatgtcggtcgcgaccattatcgacctgcttcaagaaacaatcgggtttgcagataacggagttttagcttttatcagattgattggaaacgcatcgactgctatgattatttcgttattggtcgcagtctatacaatgggcatcaagcgcaacattccagtcaaaaccgtgatggattcttgttcaactgccatttcacaaatcggcatgatgcttttgatcatcggaggaggcggcgccttcaaacaagtgctgatcaacggcggtgtcggcgattacgtagcagacttattcaaaggaacggcattatcgccaatcattctggcatggctcatcgcagcgatcctgcgcatttctctaggatcggcgactgttgccgcactaagcacaacaggtctggtcattccgttattgggccattctgatgttaacctggcgttagtcgtactcgcaacaggagccggaagtgtcatcgcttcacacgtcaatgacgccggcttctggatgttcaaggaatacttcggattaagcatgaaagaaacattcgccacatggacattgctggaaaccattatttccgttgctggactgggattcattttattgttaagtttagttgtatgaaattaagaaggagctgtaacacatgttcaattcgattggtgtcataggcttaggcgtaatgggaagcaacatcgccttaaacatggcaaataaaggcgaaaacgtcgctgtctataattacaccagagatttaacggaccagcttatccaaaagctggatggacaatctctcagcccgtattacgagcttgaggactttgttcaatcgttagaaaaaccaagaaaaatctttttgatggtcacagcgggaaaacccgtagattccgtcatccaatcattaaagcctttgcttgaagaaggcgacgtcatcatggacggaggaaactcccactatgaagacacagaaagaagatatgacgagctgaaggaaaaagggatcggctacctgggagtcggcatttccggcggtgaagtcggtgcgttaacagggccttccatcatgccgggcggagatcgcgacgtctatgagaaagccgctcctatcctgacgaaaatcgcagcccaagtcggagatgacccttgctgtgtctatatcggaccaaaaggggcagggcactttacaaaaatggtgcacaacggcattgaatatgccgacatgcagctgattgcagaagcttatacgtttctaagagaaacgcttcgtctgccgctagatgaaattgcatctatttttgaaacatggaatcaaggtgagctgaaaagctatttaatagagattacagctgagattttacgcaaaaaagacgaaaaaacaggacagcctctgatcgatgtcatccttgataaaaccggccaaaaaggcaccggaaaatggacgagcatgcaggcgattgataacggcatcccgtccacgatcatcacagagtccttgttcgcccgctacttgtcatctttaaaagaagaacggatggcagctcaagatgtattagcaggcccggaagccgaagaaaaacacttggataaagacacttggattgaatacgtcagacaggctctttacatggggaaagtatgcgcctatgcacaaggctttgcccaatataagatgtcatctgagctttacggctggaatctgccgctcaaagacatcgccttgattttccgaggcggctgcatcatccgcgctgatttcctaaacgtgatcagcgaagcattcagtgagcagccaaatctggctaacctgctgatcgcgccttatttcacagataagctccatgcctatcaaacaggcctgcgaaaagtcgtttgcgagggtatcagcaccggaatctctttcccatgcttaactaccgcgctctcttattacgacggctaccgcacagggcgttccaatgcgaacctcttgcaggcacagcgcgattactttggcgctcacacgtacgaacggactgatatggacggcgtcttccatacgaattggtctgaataacctgtattaaaaacacggtcagtttcaactgaaccgtgtttttttcttctatcccaaacaacagaagacataagttatgttttaaatatcataaacagtgatacaataatagctagaaacaatccccaagatcatcatgtgacagcagattgctgttccgttctattctgcttttggccattgtcctttgcccttgaccatggtgtcataaaatgttcaaatgccaaaacggcctggcattctgatttacaaaagtccctgaaaaccttatctaattgagaatcagcctctcatttattataaaagaaatgcctaaatcctacctgtcacacctttattaagatgaaaaaaagtaggttatggcttgacaaaaaatatatattaattaataattcatatataattagaattattattgaaagcgattatgctttctaatacatttttaggaggaatatacattatgtctttaatcggtaaagaagtacttccattcgaagcaaaagcattcaaaaacggtgaattcatcgatgtaacaaacgaagatttgaaaggccaatggagcgtattctgcttctacccagcagatttctctttcgtatgcccaactgagcttgaagatcttcaagaacaatatgctgcacttaaagaattaggtgttgaagtatactctgtttctacagatactcacttcgtacacaaaggctggcatgacagctctgaaaaaatcagcaaaatcacttacgcaatgatcggtgacccatctcaaacgatctctcgcaacttcgatgttcttgacgaagaaactggccttgctgaccgcggaacattcatcatcgatccagacggcgttatccaaactgttgaaatcaatgcaggcggtatcggccgtgacgcaagcaaccttgtaaacaaagtaaaagcagctcaatacgttcgtcaaaacccaggtgaagtttgcccggctaaatgggaagaaggcggcgaaactcttacacctagccttgatctagtaggtaaaatctaaggagtgcattcaattggtacttgatgcaaatatcaaagcacaattaaatcaatatatgcagctaattgagaatgacattgttctcaaagttagcgcaggcgaagatgacacttctaaggacatgctggctctcgttgatgagctggcttccatgtcatcgaaaatttcagttgaaaaagctgaattaaacagaacgccgagcttcagtgtcaatcgtgtcggagaagacactggcgtgactttcgccggtatccctctgggccacgaattcacatcattagtgttggcgttgctccaagtgagcggcagaccgcctaaggtagaccaaaaagtcattgatcaggtgaagaagatcagtggtgaataccacttcgaatcttatatcagcctgacatgccacaactgtcctgatgttgtacaagctttaaacatgatgagcgtgctgaacccgaacattacgcacacgatgattgacggtgcagcatacaaagcagaagttgaaagcaaaaacatcatggcagtgccgaccgtttacctgaatggcgaatccttcggaagcggccgtatgacgcttgaagaaattcttgcgaaaatgggcagcggcacagatgcatctgagtttgctgacaaagagccgtttgacgttcttgtggtcggaggcggacctgctggtgcaagtgcagcgatctacactgcacgtaaaggcatccgaactggtgttgtcgctgagcgcttcggcggacaggttctcgacaccatgagcatcgaaaacttcatcagcgtcaaagcgacggaaggaccgaagctagcggcaagtcttgaagagcatgtgaaggaatatgatattgatgtcatgaaccttcagcgtgcgaaacgccttgagaagaaagatctgttcgaacttgaactcgaaaacggcgctgtcctgaaaagtaaaacagtgatcctttcaacaggtgcacgctggcgcaatgtcaacgtccccggtgaacaagagttcaaaaacaaaggtgtcgcatactgcccgcactgtgatgggccattgtttgaaggcaaagacgttgcggtaatcggcggcggaaactctggtatcgaagcagcgattgatcttgcaggtattgtcaatcacgttactgtactagaattcgcgccggaactgaaagcagacgaagtcctgcaaaaacgtctctacagcctgcctaacgttactgtcgtgaaaaacgcacaaacaaaagaaatcacaggtgatcagagtgttaacggcatcacatatgtagaccgcgaaacaggcgaagaaaaacacgttgaacttcaaggtgtattcgtccaaatcggtctcgtgccaaacacagaatggttagaaggaacggttgaacgcaaccgcatgggcgaaattattgtcgacaaacacggcgcaacaagcgtaccaggcttatttgctgccggcgactgcacagacagtgcgtacaaccaaattattatttctatgggatcaggtgcaactgccgccctcggcgcgtttgattacctaatccgtaactaatataagaaatccgctatattgccagattggcaggatagcggatttttctttttctacagaaaaaaaccgaaccaggcactacggtaaaagtgctcgattcgagcgcttcttatagttcctcaccattcgtttgaatgacatttttataccactcaaaggagtctttcttatatcgtttcatggatccgtttccttcattgtcacgatcaacatagatcatgccgtagcgttttttcatttcgccagttgtgaaggagacaatatcaataatgccccacggcgtgtagccaattaaatcaacaccatcgtacgtgaccgcttttttcaatgcttcaatatgcgattttaaatattgaatgcgttccggatcatgaaccttgccgtcctcctccagcgtatccactgcgccaaagccattttcaacgatgaataacgggatttggtatcggtcataaaaacgatttaacgtatatctcaacccggttggatcaatcgcccatccccagtcactcgaagtgatgtacggattttcgacaccattcggcaagccgccatttacaatatcgccagtgttatcatttttcacatcgcttttcacagttgttgacatgtaatagctgaagcctaagtaatcgacggttccgtttcttaaaatctcatcatcgccgtcttcgaatgtgatgttgtagccttcgcgttcaaattccttcaacgcgtagcttggataataaccgcgaacctgcacatcagggaagaaatagcgctgcctcatttcttcttcagccagcatcacatcttcaggattggaggagaaaggataaatcggcacgtgtgataccatggccccaatctggaactctggattgatgtcttttccttttgccactgctaaggcgctcgccactaattcatggtgcgccgtttgatacatgacttccttggcgttttcgttttcgccaaccacaacacctgaattcgtccataggaacagcggattgttcacatccatttggttgttaatctcgttaaatgtcatccagtacttcactttatctttgtaacgggtaaagcaagcctctgcgaagttgacgaagaagtccacgactttccggtttctgaagccgccatattctcttgccaggtgcagcggcatttcaaagtgagacagggtaatgaccggctcgatcccatgcttcagcaattcatcaaacacatcatcataaaactgcaaaccagcttcgttcggttcagcctcatcgcctttcggaaaaatccggctccagccgatggacgtccgcagacattttaatcccatttccgcaaacaaagcgatatcttccttgtatctgtgatagaaatcaatggcttcatggtttggataaaattcgttttcttcaatcgtgtcagtgatttttctcggcacgccgtgcgcacccgctgtcatcacatcgacgacactcggccctttaccgccttgattccatccgccttcaaattggtgggcagctaaagcaccgccccataaaaaatcctttggcatgtttcccatgtttaattcctcctcagcttacgactgtaaatattttttgatgtaatgcactttcctcaatgtcttcaatgaaagctttatcaaactcaacaagcacttcgccttttttgacggtatcgccttcttttaccttcaaggaaaaaggcgtgccgtcaaatgtcaccgtatccagcccgatgtgcgcaagcaattcgacgccggacgctgaacgcaggccaatcgcatgctttgtaggcgtaaccatgacaaccgtaatgacgccgggatggtagcatcgatttcacgatatccttcgctttaggggtagaccgcttcagcaccaatcgaagtctggtagcgcagcgagaagccccaatcacattctcttccccgcctacggcctctaaaatgtcttttgctagtctcgtataatctctcactttccccgacatttcacccaccccttcgttttggttacgctttcattataattgtaacggtataatttatcaattccgaaacaaaatatttacgcactaactatcattgtaagcggtttatgctataattttgacaagtgaaactaaacgaataaatgaggaatgcgtatgttaaaataccagcaaatcgcaacggaaattgaaacatatatagaagaacaccagcttcagcagggagacaaactgccagtcctagaaaccctcatggcccagtttgaagtcagcaaaagcaccatcacaaagtccctcgagctattagagcaaaaaggcgcgatctttcaggtcagaggaagcggcattttcgtcagaaaacataaacgaaaaggctatatcagccttctgtcgaatcagggatttaaaaaagatctcgaggatttcaacgtcacctcaaaagtcatcgaactggacgtgagaaagccaacaccggaagcggcggaaaacctgaacatcggaatggacgaggacatctactatgtcaaaagggtccgctacatcaacggccagaccctttgctacgaagaatcctattacaccaaatccatcgtgacgtatttaaacaacgaaatcgtctcccactccatcttccattacatccgggaaggactggggttgaagattggtttttctgatttgtttctgcacgtgggccagcttaatgaggaagaagcggaatatttgggattagaggctggactgccgaagctgtatatagaaagtatttttcacctgacaaatgggcagccgtttgattactcgaagatttcgtataattatgagcagtcgcagtttgtggtacaggctaatagttttttattatagggctcttcactacggtaggtggtcgacatgtacaaaattatcattcctgccatactagccatctttgcgctctggatactcttacagatttcactagagatgagcatcgttaagaatccaatgaactactttatcgtattcattatctttttcctctttgtaaagatggtgaaagaaaaacaataatagtttgggcgatgcaaacagaaaaacatccttcccttaacaaactcagccagtcacatgcattaatcttgatgttaatgatatataggtgcacataaaaagctacttcattgtgaagtagctccctttattaaaggcccattttgatccatctagttttagaaaagcgaaggacaatcgcatttatgataataattgaaactaaatacaaaataataaataaaacatcattactcccaagtgtcatgttatcagattgcagcactctttctattcgggggtacatagtgttacctgcctcaaaaggagcaatgaaaccaaacgttttattgcttatagctactaagataacagaagtcatccaataaacgatactgacacctatactaattaatatattaggacataacacgcttatagttccgataattagaatatactgcagtataactgcagaaaataaaaaaagtaataatgcaaaatgcgaaaaatcatggtacatcaacgatatgattagcaggcctagcgttataaatgcaaaacattctaaaaataaaacagctatctttttataaaagaaagtatagatgttctctccaattaacttgtaaaagagaatatttttgtttgaatactctctattaataaagaaagctataacaaatgaaaataacatcaaaccaaactgggtcgcaacagtataggagctaaagaaaaacatttcaggtgtaacattactgactttatcgattccaacaagtaaaaaataacccagcaaaaataaaaatacaaacattgctcctaaaataatgataactttgttgctaatactctttttaaactctaatttcatctcaagcccccactgttttattactcatttatatacacttcaattaatttatccactgaatgatattgttgaatttcttggtgattaaatatataataatccccttctatcgcctttaaatcagacaaatcatgtgtaatgttgatgataatcttctcggggttctcctgaatatacttgtttaagaagccatgaatctctataaccgtttttttgtctaatgaattcgttatttcatctaaaacaataatatttttatcctctaataagaaactgagcaattttaatttttgcttttgtccatcactcaaatttttgatcagaacttttccatcaatattatccagattaagtaaatatgcgattttatctatcatttttgcatcaaattttttactcaaaaagtgtaataaaaagtccttagaaacatcattaggtatattcgacgagctggatattaaagaaacattttgacgaatatctctgccgattcttttgctattattcaacaaaaagtctttagcaagctgtgatttaccgactccattttttccgacaacgtgattaattttcccgctcgaaaaatgcaagtcggtgtcctgaagtaacgttttgcctttcacttttaaagtgtaattcgctatattcatatacatactcctaggaaatatttgcataataataaaatgttctgccttgtgatttgttactaatgtctaagcttttgaggtacctctttcgtttccgatccggaagcgaaagaaatgtttttagatggctaatttggagatcttttactctagtttacaatatataatatccaatgtacaactgaattcactgcaaggccaatccctataatttgaatcgtaagaactaaccaatgatttgtcttaaaacggctatattcatctaagctcagaaaagctaaaagaattttgtaaccatcagaattcaatattgggattaagttccacaataaagtagacgagaaaagcataaatgccatagttaatgcttcactggaaaatgtaaattgatttattaattctaatgtatttattaaaagataattgataaacaagccaaataaatgaacgattatcttttcatttcttgatagcatgtaggtttcattcaattggacataaaaagcaggaaatacataaaaattcagtttgaatcccactttatcaaagtttttcccgaaaaattttaaggaataaatatgtcccagttcatgaagcactatattcattataaaataaataactataattatccacattttccagccgtaaaatactgaggacaatccattttgcaattttattaaatgaatataatttaatatgaacatgagagccgtaaaggataagaacagataaaaaaactttggtgatactttctctttatacattttaaaacgtaataattgtttatctgacagagaatttaaactatttttatagtattctccgctttttttgtcttttataaatacgttgttttgcacaagcacttcatatttttcatcttcatactttaaaattttcattatagtatttttccatataaggatagaagtagtttattttttctgcagagttgaataaggaaccacaaactccacaaatagaggaaaattcataaggaatgtcaaattcctctattttgttattttcttttaaaatattcaaaaaccatttgaatccttcttttctaagaataaataatagcaaattggaatttaacttttccacggttctttcgaaactttggttatattcttcccttagggttattttcgtttcaaaaatagcaggggaacaacatggataaatttctccatcatgatgatatacaatgtcatatccgggacaatgtaaggaatcttcatcttcaagactgtaaaatttatgtatgttttcttgcttaattctagttttagcagcgccaactgatatcattggaaattttgttatctttacacctaagattgaatcccccaattcctctaaaatgtggttggacattttgtctttggtaactgccatattaagagaaatatcgatatcagggtatttcctgctatgttctaatatgtttttaatactggaagacttgacaaatggagcatggtactcatcataacttatagtcagtgctatcacatttaaagaattcatatcatgaaagtactcctggacctttttcttgctcaaaccccaaaatccattagagatcaacgttatttgtttttcatatggtttaatgatttccattagttcttttaaaaatttataatctaaaaaaacttccccacctgtaaaagaaatcacttgaatggttttgttttttgcaaattcagttactaactctcttatgtattctttttccatcctggttgttgaagttggtgaactagaaaaacaacaatggtcacaggatgcattacaccttgaatctaaattgattgatactgttttattatacatgaaatatcccccaacaaatggtaaaggagagttagactctcctttgtacccctctaattaatgaccacttccaagaatccagcgattttcttttgattttacaaaataccaaagatcattcacttttgctaacttttgtgattcatctaatagacccttaaattctaagtttttcacagtctcattgttagtgatttcctttttcatattatccctcctccttttctaatataaaccaattattctatatcattcaatacatgtcaatatattgtacctaaaaaatctgaaaaatgtcactattcttggtatataaagcctatagtcctctagcccctctaagctataccgaatgaaaggccatagtttgatttaaagcttcgtaatgaaaagtaaaacatcaatattgactacactagttaagggatatacagattttaagtggaagaaatgaggcaaacaatcttaccctaaaccaacctgtactgaaaagctgttttaagctcttgcttaccccatttggcacctctttctctcgttttaattgtctctaaaagcagttatgcggtactatcatataaaggtccaatgtttaaaaataatgtcatacttttaaattcaccttatcatgcacatgctcataaagaggggtttattctaaaaaggggatggacggttttggaaagcaagtacctagatctactcgcacaaaaatacgattgtgaagaaaaagtggtaacagaaatcatcaatttgaaagcgatattgaacctgccaaaaggcaccgagcattttgtcagtgatctgcacggagagtatcaggcattccagcacgtgttgcgcaatggttcaggacgagtcaaagagaagatacgcgacatcttcagcggtgtcatttacgatagagaaattgatgaattagcagcattggtctattatccggaagacaaactgaaattaatcaaacatgactttgatgcgaaagaagcgttaaacgagtggtataaagaaacgattcatcgaatgattaagctcgtttcatattgctcctctaagtatacccgctccaaattacgcaaagcactgcctgcccaatttgcttatattacggaggagctgttatacaaaacagaacaagctggcaacaaggagcaatattactccgaaatcattgatcagatcattgaacttggccaagccgataagctgatcaccggccttgcttacagcgttcagcgattggtggtcgaccatctgcatgtggtcggcgatatttatgaccgcggcccgcagccggatagaattatggaagaactgatcaactatcattctgtcgatattcagtggggaaatcacgatgtcctttggatcggcgcctattccggttccaaagtgtgcctggccaatattatccgcatctgtgcccgctacgacaacctggatattattgaggacgtgtacggcatcaacctgagaccgctgctgaacctggccgaaaaatattatgatgataatccagcgttccgtccaaaagcagacgaaaacaggccagaggatgagattaagcaaatcacaaaaatccatcaagcgattgccatgatccaattcaagcttgagagcccgattatcaagagacggccgaactttaatatggaagagcggctgttattagagaaaatagactatgacaaaaatgaaatcacgctgaacggaaaaacatatcaactggaaaacacctgctttgcgacgattaatccggagcagccagatcagctattagaagaagaagcagaagtcatagacaagctgctattctctgtccagcattccgaaaagctgggccgccatatgaattttatgatgaaaaaaggcagcctttatttaaaatataacggcaacctgttgattcacggctgtattccagttgatgaaaacggcaatatggaaacgatgatgattgaggataaaccgtatgcgggccgtgagctgctcgatgtatttgaacgattcttgcgggaagcctttgcccacccggaagaaaccgatgacctggcgacagatatggcttggtatttatggacaggcgaatactcctccctcttcggaaaacgcgccatgacgacatttgagcgctatttcatcaaagagaaggaaacgcataaagagaagaaaaacccgtattattatttacgagaagacgaggcaacctgccgaaacatcctggcagaattcggcctcaatccagatcacggccatatcatcaacggccatacacctgtaaaagaaatcgaaggagaagacccaatcaaagcaaacggaaaaatgatcgtcatcgacggcggcttctccaaagcctaccaatccacaacaggcatcgccggctacacgctgctatacaactcctacggcatgcagctcgtcgcccataaacacttcaattccaaggcagaagtcctaagcaccggaaccgacgtcttaacggtcaaacgattagtggacaaagagcttgagcggaagaaagtgaaggaaacgaatgtgggtgaggaattgttgcaggaagttgcgattttagagagtttgcgggagtatcggtatatgaagtgaggggtgtggggttcagggatggtgatatgctgctcccctaaaagtagatagatgaattttagaaaatctgtttgccttggggagttttttcatggctggacaattatactacaaggaagaaatactaatacttatagaatgtaattgggtaatgattcggagaaagaggttgcgaaataatatggtattacactgaaacaattatcaatggagaacatgcacgatatagccgttctatattctccctctattatggcactcattagtagacataaccgtaaaaaaatgcactcaaaaaaagtccattctatataactctcgctagggtggacctttttcaacattcaaagtactagattttttctagtgaaagaataagaaaagacataagttctattttatcactctgttataggttaagttattacggtgtttcattatatactgaatttaaacacccttgacattatgggaatttttaaaacaggttaaaaggaagttctataagaactccctagtttaatattatttggtcaaaatctaaaaccaaaaaatctatttttatcttcattgtttctatctaattttgcaacaatcatacctttcgactctaattcttgaaggtcatctaataataattcatttttatttattgttacaaaatattgtccgatcctattctctaacagacttgaattgatatgttttaataatgtaccttttacatgaggatcaggattagaataagatccgtcatgaattaaaatattcaaactacacttatttatacacctgtataaaaaccaagtaagatcaaatatatttatcttcatatggagtctaccatgtgaacgttcatccggtatagaacaagaaattttgatccttcctgtagttgattgttttgcgttacttattctattatcatattcaaaatctaaaaatccatgttggttgtatgtaacatccattagattattaaaaagcttctttaactcactaactatagcgctataagattgaaactcatcataatacattgaattaactcttaatatttcatgttgaagttcattaatcttatcaaaaatatggttttttttatcgtagtcactaattctcaatcttacttccgctaactctatttctttccttctttgttcttccatcacaatggaaatatcctcaatgaaattgttactctttaaaattctggcacttgattccagttgttctgttaatccttgctttttgatattaagtttttttaaatcggcttgtattttaacaattttatctttaaaataactccctctactttctaccatgaaattatagaactcttggactttattataattctgttttacttcctctggaaaaaaacctacaatatcttcatagaatttttctatattttctaattctttaatcttagttacttttttatttaaatcatctatatttctttgatattgtttacaaatatgttcattttcaaatatttcattttgtattttattaagttcacttttaatttctgagtacctatttgtatcattattatatttattggcagtcttagtttgatagataactctattgtaatcctctatctcatttattaattcatcttccttaacttttaaatcgccaatgttaatattcattgattcaatcaattttatttcactatttaatttttcaatcttatcccgaaaaacctttatgtttttttctgtatgagttggtaaagtaaaaagatagttaagtaatttatattgttttaaccctcccctattcggtaaaactatatcattaaaccctgtcttttcgtctcttataatatactcccttaacgccgcaaaagttatatcctctttctcaccctttaaaatttccttttcaataaattttttatatacacttatactaacttttttccattcctccaaattaaaagttaaagaagtatcatgtaatgtataaccatgtttaggagaattaaaagatctagcaaggaatacttgatttccatcaatttccacattcaaaacaataaaaacgtttttattgagaagaatttcatttgtcgtataaaaatttgatatagtcttccctagtaaaaaggagatgcattcaatcatcgttgacttacctacaccattagtctcttcatgatcttctctcttttcaccaagtattatatttactcctacagcattaaatttatactctttcaaaatttcttgggaattgcaaacaaaaagattttttataatcataacaatcactaactctccgttctgctaatcatattttgattaaaagaaactttacctaatgaatataaaaaagttaacgataaatacagtatccgttcaatattcaaatttattataataccttgactcttagcataatcaagaaaaagttgatcaatatgtttttccttctctaacagttcataaagtatctttgatgagtataaaatattttcttccacagcattatatttagttaataaaaaatgattcatttctggcctctccgccttttccttttttaaaggagaattattcactagaggaataagatcatttccaatttgaatgtttttaaactcattttctaataaaacataagagtatttgagaatattttcagctgtttcaattttaagatcaatcattcttaacacttcttttgttatcattaaaaatctcacattcataaatgcaccaacatgttaaaatcttaatgtattttttcgttaaagcctttgaatatggtaaaactgaatgacattctagataaatctcattaacaatttttacaaatatctcatctccattattatattgattatgaaactctagatatttgtctactatcgtctcagcaatcaattcctttttatcagcacttacatacgaagtggaatccattatatggtttatcacaccaaaatactcagaataactatcgaatttccgtttaaaagtttccccacttttcatatcataaaattttttatctaaaccaatttgattatcaaaattactagtaaatgttttataactttctctatactcatgaaaatctataataaagctcttaaactcatcttcatcaattttatcatcgttatcttctatttctttttcaataaggctctctaatctattaatcttataatttaacttcccttcctgtagtctccttcctccttggttgttttttgaccagtatttatattcggtattccaaatgtagtatgttacttctgtctcgccattatctaaattcacatccaccgaaataaattctggagtagcatactcatcctttataatggctccacttactaattctaagaatggattttcatttgtatttgcagtaatattaaatgaagaatcatgtacatgtcctgccaaatatagatcaataaagtaatcatcaaaatgtgcctttattgattctctttcggaagattcaatacaacctaacgtatggtgcccaatagctatatttaataccttgcccttatttttctctttgttcatcttccttattgctttatataatttcatctgtgcagttaataacgttccttcttcaccttttttatctgataacagacatgtatttattgataaaacattatacttctccgattgatacaaaaaatgcaaatcttcttccggatatttaacacccataaaatcttcataaaaatcgaaaaatttcctttgaccttccactaatatatttgtagctttttgatctagtttatccaacatttctgaggggttaggagatttcataatactatcaatcaaaagtgtcctcgtcatgtctctagatatatcgtgatttcctggcactaagtgtacgttattcttacttaatcccatacttttaataattccattaagatattctttaacatcttcgttatacacatcacctttgtgtgctatatctccagttaataataaaaaatcaaaatctgactctcttcttaaaacttctataaaatctaataatttatctctcattacaatagtgtcataattttgaaactgaaaatgcaaatcagaaatttgtaaaaaacgtaccttcaatacaaacatcctctcataagtatatttatcccctatatatttctagaaaactttttattctatatcatctttactctttaatatattaagactctttccacaccatcaaataaattataacctaaacataactctttactcattttagtattgtatttaagtcaaacattgcattggttgctgaaatattatattcattgaattattccattaaatagcttttagttgaactttagtctttctgtaatggtggagatgctcttacttatgataaggctccccacgattaatccgaaaagcccgataaatctgctccactaaaataagccgcatcaactgatgaggaaatgtcatcttcgagaacgatagcttctcgtccgctcgcttcatcaccgtgtcactcaatccgagtgatccgccgatgacgaaggtgactttgctttttccataagtagccagcttatctattgtatcggctagttcttcggatgttttcatttttccttcgatggcgagggcgatgacgtgggcgtcggggctgattttggataggatgcggtcgccttctttgtcttttatgattttcatgtcctggtcgcttaggttttccggcgctttttcgtccgggagttcgatgatgtcgatttttgcgtaggccgaaagtcgtttggtgtattcttcaatgccttgcttgaggtatttttcttttagttttccgattgtcacaatattgatattcacaggtcatccccactttaaaaacaagttattcatatatgttgtccacaattgtggatatcttttctgtattttgtgtaagatcattcgttccccactatatatactgcggggtctccacataattcacaggctgtggataaactgttagtatgttcgatttttctgatttcgggcggcagctcgtggtcgtctatgtacatatccagcaccgtttcgatgtgttcttcacaagaataatacgcttgtttcatgttcaaatcctccgatgttttcttccatttttacaaatgttctcttctcaatataacctatttattcacatgttagtagtgcttcgggctgagttttatccacaattcgacaaacaagctgttgatgactctatttcgctcgtgtgttagtttggatgtaaccgatgtgtggggaggtctgcatttgcgctttagatgggtttggctttttgtgattatgttgctgcttgctgagtgtcagccatcttattgggtgttggagaaggatcgaatcggtgaaggcagtccagacttagaaatatacgctaattatctccaaatgcatgatgacgtgaaaggatatcaagtcttcaccatatcagaaggcaaaaaaatggtcgtcgtgtctctcggaagcagcgagaaagataagaagcttgaagtgtcggacgtcaaattctcatctaaagaaacgattgtaactgtggagcgaaaacctgctcctacggcaaatgagaaaaacccttttattttgattggactggacaaaattgaaggggatttaattgttcaagacgaaacaggagatcgctttgaagaaacggattaccagcaataaagccggcgttctgagaacgtccggctttttcttttacttcaatgtcccatgcgggtcgatgacgaattttttggctgcgcctttgtcgaagtcgctgtagccttttggcgcgtcgtccagagaaataacggtggcattgacggcttttgcgatctgcgctctgccgctcaggatcgctttcatcaaattgcggttgtatgtcatggcgggcgtttgtccggtgacgaaggtgtgggctttggcccagccgagtccgaagcggatttttaatgagcctgttttggcgtccgcatcctttgcaccgggatcttcggtcacgtataagcctggaatgccaaggctgcctccgacctgggtgacgtccatgattgagttcagcacggcggctggcgcttctccttgattgccgtgcccagatgcttcaaagccgacacagtccactgcagcatcaacggttggttcacctagtatttgttcaatttgctcgccgaggcggtcgtgtttttgcacgttgaccgtttcacagccgaagcttctggcctgtgccagcctgtcttcgttcagatcgccgacaatcacggtagaggcgcctaggagctgagcggagtgtgcagctgccaagccgacaggacccgctccagcgatataaacggttgaacctgtttgcacgcccgctgtataagctccatggaagccggtcggaaaaatgtcggacagcatggtcaaatcgagaatcttttctagcgcctgttctttatcagggaataccaaaagctgaaaatcagcgtatggcaccatgacatattcagactggccgccgacccagccgcccatatcgacgtagccgtaagccgatcccggccggtccggattgacattcaggcacacatgcgttttctgcgttttgcacatcacacagcgtccgcaggcaatattgaaaggaacggatacgatatctccttttttgataaattcaacatcacgccccgtttcaatgacttctcccgtaatttcatgcccgagcaccaagccttctggcgccgttgtgcggcctctgaccatatgctggtcgcttccgcaaatgttggttgtaatgactttgagaataaccccatgctcacattttcgattcacattcgccttcgggacgccgggcccgtccctcaagattaactccggataaccgatatcctccaccgctacagtccctttgcctttgtacacaaccgctttgtttcctgtcaacgccattcctcccattcatgtgtttggactctccgtccttgaacatgacttcggttcggcatgactctttccctttttcacgactgttttttctgtattcttacaacaacaaatatgccaagaaagcatccaataatggttccgccgatgtctaagaagtcgactttacatccatttaacaagaacacagtaatggccgaaaccaggcagatcataactgccagaagaataacccgatttgtctgcatgtaattcctcctttggattcgtttctaaaccatacccaaaatcctctgcaaacttcggttcaacaaaaaaagagacttcacaccagtctcttcataaacagagatcactcaaaaaatttcctgagaaataatgtggcaacactcgttactaacgcaattgccgtatacataacaacccaaaatatgaatgagctattccccgaagctaacgtaactaacaatatcaagctcgtgataagaacgatgagcggtgccacccaaaatcttttaaataaaaaatgacccgctataccaaatacacctgcgacgatcggaaaaccaaaaacgataaataaaacggcgatggctcccatactaccctccttgccttaaaacctcttcatcacctcaacatcatacagcttcaaatgactcttcggcgtcacgacatcctttaccttcccaatctctttttctttcattttctttccggttttcaggctgtactgttcaatgtaggcaggcttgtgatacgtgtatgtgaagaaatagaggctgctgcctttttgggtgatttctttgaattcggctttcattttgtccggggaaagggtgaagacgatgcttgtttttcctgtcttggcatcgattttgtgtacctttccgaagccgtcaatgaaatacaggttcccgtcataagggaaaaagctgtttttaaagctgaagggcatggagctgtatatcgtttgttcgtcgtttttgtattcggcgatatcgtgcagctctacttcgccgctttttttgttgatcttgaccatttgatagagatcgtgggctttttggccgcgaaccataacatacacagcttggtcgtccacggcaagttgggattcgactgaggctccttcccggtactgccattccgttatgctgagataggtaagcttcttctgatctgcttgaatctgaaggagctgatagccttttccgtcatctgtcgggacgagtgcgtaaatggcgccatcatggaaaccggaggctcggatgtagtaggggatgacgtcttttttccactctccgtccatttggcggtacagctctgagcggtatccgtctccctttttgtcgtagccggagttgtataaggtgtaaaagccgtccgtgttttgcagaaagcccgcgctgtcgcctgtgtgctgataggttcttttatgggagcgcaggccgtttttgatcgtataaatcgtgtttttgtcctccagcatcacgctgtcaccgtgaacctttgctgagcccagctcaaggcccttcatctgaaaggaagacagcgtcccgtcatggctgataaacagggcgtagcttttcccgccgccaaatgcatcttgatccgcagaggatgagaaatacagcaggacttctttgtcatccaggaaatcgggatttctgagatcctgctgactcacggttttatggcttttgagaggagaaatgaagacaaatagtgcgattcctgcgagaatcagcatggcgatggtaatcatccactttttcatagccttctccttagtaaatggtcataatggttgtcgtataagaagaactagtgatgtcgcgcggatacacgcctaagcctccgttgctgtctatatcaatccctgctttcagcaaaaaggcagaccataggagctttgaacagtttttggcgccgtcatggccggtatttctgttattgacgaagttaaatgagtatgggtcgccgacttttgataccgcccagtcggcagcagctgttttttgagatgaggatacgctgacggtttgcacaatggagttgtcttccacgtctctggcattatacgcgatctgcctgacgccgtcgctcgggacagattcaacaattttgtcagcggcggagtacatgccgacatggccgtgattgtagtaggctgtgtaggagttcgtgtaatagatattgcctttcgcgcttgtcgggagttttttcgtgccggacgagccgcccatgatagacatgccgctttccttggcgagccggtccccctctgctttatcagccgtgatctccttatagaactgttttaggataacgtcctgctttacgtgctgctgtttggcaatctggctggcagatttcatgatttcttccggtgtcgtgcctggctgcagtgcggcgatttcttcagcataatttgtggtctttacggctttggcgggagtaacaaacaggccgccgcacattgtgagcgctaccaaaaacatcgacactcgtttcttcaacttcattacatctcctcttttcttgtgagtgtaggaaaggtaatttcctcacccacattatattaggaaaataaggaaagtaactaggttatttacagaatttttagaaatcgtttacagaaaaaggcctttatcaggcccttttcgttaaagcttcttgctcatcactacgtctgtttcttgaaatccggtttgctcatatagctttcgagccgtctgattatgggcaaagacatgaagggacagcttgcggattcccatactgcgtgccgcttgatctaatgccgccaatgcttgctttgcgtagccctttccccgatacggttcatataacccgaaatcataaataaacgcttcctgctgcggatgctccggttcagcatgtatccagagccagccaacgatatccttttcattcagcttgaggctccacaaatggtgatggggtgtttcgagccctctcggaagcagatcagtaaacacctgcttagacaaaagctgggcatcttcaggcagccatgttcccgcttttaccttttcttccgcgtaatgctttgttgtgtacgtgagataagaccgaaattcttctgtctgcataggggttagcataattgtcatatcatctctccttcatatattgactagaggattttacataaaatagaaagaggtgttactatcagaataagcaactgagattgataagtcactagagaaaggagtttcacatgaataagatcgcacccgcagaaatcgctagcatgctcaacgattggtaccttgccatcaagaaacatgaagttgaagaatcctcccgtttatttgaagaagtgaagcctttattggatgacatggaagaggatcaggaggtgcttgcctacttctccttattggaactgcgccacaaggttttgcttcacgaggcgagaggacagggctttcagcatgaggagccttctcatatgaatgctacgtctgacatgctgaaatattacttttttctgtttgaaggcatgtatgaggcctataaaaataattatgacattgccattgggctgtataaagatgcagagcagtatctcgacaacattcccgatccgattgaaaaagccgaatttcacctgaaggtcggtaagctctattataagctgggacaaaatattgtgtccctcaatcatacacggcaagcagtcaaaacattcagagaagagacagattataaaaagaagctggcttcagccctgattaccatgtcaggcaattttacagagatgagccagtttgaagaagctgaggcttatttggacgaagcaattcggatcacgagtgaattagaggatcatttttttgaagcccagcttttgcataacttcggccttctacatgcgcaaagcggcaaatcagaagaagcggtttcgaaattagaggaggctctacagaacgatgagtatgcccgctccgcctattattatcattctgcctacttgctgatacgagagctgtttaagatcaaaaagaaagaacaggccttatcttattaccaagacgtgaaggaaaaattgactgctgagccgaatagaatatgtgaggcaaaaatagacattttatatgccatttatgcagaagggggtcatgcggaaacgtttcacttatgcaaacaacatatggatgacttgttgtccgagaaagagtatgacagtgtaagagaactttccattttggctggcgaacggtatagggaacttgagctttacaaagaagctgcccactttttttatgaagcattacagattgaagaactgattaaacgaacggaggttatataaatgaaaagatttctgattggcgcaggcgtcgcagcggtgattttatcaggttggtttattgcggaccatcaaacccactcacaggaaatgaaagtcgctgagaaaatgattggataaatgaaaaacccccgcgggatgcgggggttcaatttaacgaaagaatcctaaaacggtttgtagttttaggattctttcatcttttcagcgtgattgaaaacccttgaagtctaggaagaacgagcattggagcgcagcgaatgtttggaattcgtgagcaccgaagcgcaggcctgacaacgaatgcgagggtttgtcgacacgctgaaacccccgcgggtgcgggggttttcttattacagcagcttcttccctaacagggattctacgagctctactgctgttttgcccgttttgtttttgtgatcaaggatcgggttaacctcaacgaattcggctgaggtaatgatgcctgcgtcatacagcatttccatagccaaatggctctcccggtagctgatgccgccgacgacaggggttccgacacccggtgcgtcgttcggatcaagtccgtccagatcaaggctcagatggacgccatcacatgctgataaataatcaagggtttcttcaatgacctttgtcatgccaagacgatcgatttcgtgcattgtgtacaccttcatgccgctttccttaatgtacttgcgctccccttcatcaagtgaccgggcgccaatgatgacgacgttttccggtttgattttaggcgcgtagccttcaaggttaaccagtgactcgtggccaatgcctaggctgaccgcgagcggcatgccgtgaatattgcccgatggtgaagtttcaagtgtattcaaatcgccgtgcgcgtcataccagatgacgccgagattatcgtaatgcttcgctgtgcctgcaagcgtgccgatcgcaatactgtggtcaccgcccaggacaagcgggaattttttctcttcaatgactttgttgaccttttgcgcgagtttttcatttcccgccaaaacggaattcaggtttttcagttcctcgtcatttttgattttttcgcgattgatcggaatgtcaccgagatcttcaaccgtataccccatgtctgacagcctctcgatcagatgagcgtaccggatggcactcgggcccatatccactccgcgtcgtgcttgtcctaaatccattggcattccaataaccgaaatcgttttatccatctgtgattccacctcaacatttaagataatgtcctatgcgggttataacaaagatgacttgcggacaacgtttttaaagctctagctgacgatttgcctgctggcgttttttaatgacgacatgataaatgatgtagcaaatgatcataaacggtacgccgcaatacagcgcgatacgctgctccggatcaaatgcaagactgatgagcacgaccgtatttaacgttaggccgatcagcggaagcaccgggtacagcggtgttttaaatttcaaatcttctatcttcccgccctcacggatatatttgcgtctgaacatgatttgggaaagcgagatcgtaatccagccgacctgcgcgctcatgcccgccaaagataacagtaccatatatacggtttcagcctgcgcaaactttgtcagaagtgataggcaggccacagccatcgttacgattaacgagtacatcggtacaccgcgctgatttgttttgccaagcgctttgaaggcttgtccttcattcgccatcgcgtacagaatacgtgttgatgcgtataaacctgagttcgcaacagataacagtgcgattaaaataacaaagttcatgatatcagctgcatatgggattccgatttgctcaaatacggcaacaaatggactttccacgacacccgcctgtttccacggaatcatgccggcaatgacaatgattgaaagcacaaagaacacaagcgttctccatactgtctgtttgatggaccgcggaatcgttttttcagggtcttcactttctccggctgcaaccccgatcagctcagtcccctgaaacgcaaagttcacagtaatcatcgtaatcagcattgcctttatgccgttcggaaataacccgtcttcataaaaatgtgtcaaaaacggcgcctgctctccgcccttcagatcaatcaggccaaacatggcagctccgccgagaataataaataaaaggataatcaaaattttaatgcctgagaaccagaattcagattccgcaaaggcttttgtggtgatcgcatttaaaataaacatcagtgccgcaaagaccagacaccagatccacacgtctatatgcggaaaccagcgttgcatcagctgccccgctgataaaaattcaatggcgcatgtaaccgcccagccgagccagtacagccagccgaacgcaaacccgaaggccgggctgataaatttcgtggcataggtctggaaggaccccgacacaggaaaggcgactgccagctctcctaagcagagcatggtcaaaaacatgataaagccgcccactaaataggacagaaccgcgccgagcggtcccgcttggttaatggtaaacccggttccaaggaagaaaccggttccgatcactccgcccaatgaaatcatgaacaaatggcgtgatttcattgtccgctggagctgatttccgttatcttggtttgtattcacattctgcaccccttcagcaacttgtattggatctaagctggaacatctgcatggtgctatcccagtttgctgtccaaagagtctctatctatttaatataaaattcacttcttctcataaagatacattatactaaaatactgtagctgagcaaatagggagtgctgatttttctgttgtaaatttatacaaacgaagtgaatatcccgccatggtgcggatttatgcgtttcgcagcacgtgcttaattttctctatcgcccaatccaagtcctctttggaaatgattaatggcggtgcaaaacgaatgactgtatcatgcgtttccttgcataaaagtccctcttccttcaaacgctcacaatacggacgtgccgcttcagtcaattccacaccgataaacagccctctgccgcggacttctttaatgacagggctgtcaatactctcaagctcgcttttaaagtattcaccaagttcaagagaacgatccgccagcttttcatcctccagcacttctaatgaagcgatagacactgcacatgcaagcgggtttccaccaaatgttgagccgtgtgagccagggttaaacacgcctaggatctcgcggtccgccgcaatgcaagagatcgggaacacaccgccgccaagcgctttgcccaagatatacatatccggaacaatgccgtcccagtcacaggcaaacgtcttgcctgtacgtccgagacccgtctgaatttcatccgcaataaacaagacattctcttccttacaaatcgccgccgcttcctgtaaaaatccttcaggcggaatcacaatgcccgcttcgccttgaatcggttcaaacaagaatgccgctgtattcggcgtaatggcctgtcgaagcgcttccacatcgccgtaaggaatgagtttgattcctggaagcatcgggccgaatcctcgtttatattcctcttcagaagaaagagataccgccagcatcgtgcggccgtggaagttcccgacacatgcgataatttccgcttgattgtcagctacgcccttcacttcatacgcccagcgtctcgccgctttcaccgcggattcaaccgcttcggctcctgtattcatcggcagaatcatctctttgcctgtcagtttagctgttttttcgtaaaacggcccaagctgatcgttatgaaacgcgcgtgacgtgagggtgattttatcagcctgatcctttaatgcctgaatgattttcgggtgtctgtgcccctggtttaccgcagagtaagcactcagcatatccatatattcattgccttccgggtcctttacccaagcacccagcgcttcagaaataacaatcgggagcgggtgataattgttggctccgtaatgagacgtctgatcaataatttctttggatttagataaagctgtcatatttgaattcccccttgttttctgtttcaacatgttatcctgctttccctttatataaatgcaagttctgtgccaaatcaagaattcgtgtgttttctacaattttcgaggacaaggtgcaaaaacattctgatatttcgagcgaaaatttcagcaagtgcaaaattcttttgcatatcctctccgtttttttataaaatagaagcaatattaagaaaataattgagggaggttcatacagtggtcaaagacagcgaattcctcacattggtttttcagagtattttagatgaaatcgatgttggcctgcacgtggtagacgagcatggaaacacaatcgtttataacaataaaatgatgcagattgaagatatggagaagcatgacgtcttgaataaaaacctgatggatgtgtttatgttttcaaagcagcaggacagcacactggtacaggctcttcaggaaggcaagacgattaaaaacgtcaaacagagctatttcaataataaaggccaggaaattacgacgatcaatcatacatatcccatcgtccaagacggcaaaatcaggggcgccgttgaaattgccaaggatgtgacaaagctggaacggctgatcagggagaatatgaacaaaaaaggcagcacaacctatacgtttgacagtattctcggcaccagtccggccattcaagacgtcatcgaaaacgccaagcgggcaacccgtacgtcatcatctgtccttctagcaggcgaaaccggcacgggaaaagaactgttcgcgcaaagtatccataatggaagcgatcgttctggcggcccgtttatttcgcaaaactgcgcggcactgccagacagccttgtggaaagcattttgtttgggacgaaaaaaggcgcgtttaccggcgctgtcgaccagcccggcctgtttgaacaagcccacggcggcacactgctgttagatgaaatcaactcgctgaatctcagccttcaggcgaagctgctgcgcgcccttcaagaacggaaaatcaggcgcatcggttcaacaaaggatacaccgattgacgtacgtattattgccacgatgaatgaagacccaattgatgcaattgcaggcgaacgaatgcggaaggacttgtattacaggctgagtgtcgtcacactgatcatcccgccgcttcgggaacgaaaagaagacattttgcttctcgcgtcggagttcatccagaaaaacaaccatctgttccaaatgaatgttgaacacatcagcgatgacgtgaagcaatttttcctttcttatgactggccgggaaatattcgcgagcttgagcatatgatcgaaggcgcaatgaatttcatgacggacgagcaaacgattacggcttcccatctgccctatcaataccgcatgaaaatcaagccggctgacatcccagagccggaaacaccaagacaccagccagccgcggacttaaaagaaaaaatggaaagcttcgaaaaatatgtgatagagaacgtgttaagaaaacacggccataacatctcgaaagctgctcaggagcttggcatcagcagacaaagcctccaatatcggctgaagaaattttctcactcgtctaacgaataatccggagcaggaagcctgatcagaaaaacagtgcctctgccgatttcacttttcacttcaatcgtcccattgtgattgtcgataatcgatttcgttatggcaaggcctaatcccgaacctccatatttccgggagcgggatgggtctgccttgtaaaaccggtcaaacactaaaaaacgtcacttcttatgcattgaagaaagaaaatggcacctatgtgtatcacagccagcaaccacacggtacaaaccattaaagtccatgcaaataacggaagtatttgcagctaactgccatttgctgtttcacgtgtaacatccatcttgtatttttcttcatattcgatatatcctttttcaactgaacgggcgtgacccctgttcagttttttttgcatatcaaaacagcctggcaacgatgccagactgcttttattaactgcctaattggtctgcggaggacagcttgatatcaacagatttttcttttccgccgcgataaaacttcaccttcacccggtcaccgacttttttctgataaagccgttttcgcaggtcaacaatatcatttactttgtatccgtcaaattccgtgatgacatccagttccttcagccccgcttttccggcaggtgaaaaggcgtctacacccatcacaaccgctccattggtgacgttcttaggaagctttaatgtttcatcccaatgatagcttgcgatgtcacttagcgatttcatctcaatgccaaggaacgggcgtttgacctttccgtatctctctaaatcctctatcacagggatcacgagcttagacggaatggacaggccaatcccttcaaccgctgactcggcaattttcattgaattgatgccaatgaccttcccatccatatttaacaaagcgccgccgctgttcccagggttaatggccgcatctgtttgcaggacttcagcgttccagtcaggctgtccatcaccgtttgaatctactgggatcgccctctccgtacccgagatgacgccttgtgtgacagagcctgcaaactcaaggcctaacgggttcccgatcgcaataaccggctccccagacttcactttatctgaatttccgaaatcagcgactgctttaatcttatcgcttttcacccgtaaaacggcaaggtccatcagctggtcgctgccgacaagatcagctgatacacgtgagccgtctttcaagctgatttcaatttgggaagcgccttcgatgacatgatggttggtcacgacataagcggaatggtcatttttcttatagatgacgccagagccgctcccagcctcgccgctctctccccaaatatctgatttttggatgttcacaacaccgacaacggcgggcgacatattgctgacaatcttggtgacggcattgttgacactgacattcaccgtcctgattgattcccggccattgttgttttgctgctgatctaaggcgcctgtatccagcccttcatttgaaaggtacggcatgataaacgccattaatacggcaccgacaatcacgccaatcagactcgaaagaaaatatccttttttgcttctctttggctgttcaggagtagtatgttcttcctcacgttcgtaatccaccatattccatcctttccaagaacgttaatatggttatattgtgggttagaaactcctagaatagtcatgatttacatagaaaaattatacagcgcaaagcggagtggccttcttcggatcggtgtcgtataagtcaaatgtctcacccgtcacaaatcctttagaagccaatgtctgctgcacagacattcttgccagctccttcatgttgttgtcctggctcaaatgcgccaggtaaatacgagacgtctcatcgccaatgacatccgtcatcgccaaggcagcatcttcatttgacacgtgcccgacgtcacttaaaatccgccgcttaatgctccatgggtatcttcccatttgcagcataccgacatcgtgattgctttcaaacacaaatacattcgctgaacggataatgcctttcatccggtcgctgacatatcccgtatctgtcattaacgcgagctttcggccgctataatggaatacataaaacatcggttccgccgcatcgtgggaaacgccaaacgattcaacatcaagtccgccgaacgacttcaccgtctccattggaaatacaaacttttgatcggtgtcaattttgccgatttgattctccatcgctttccaagtcttctcattcgcatagatcggaagcttgtactttctggcgacgacaccaaggcccttaatatggtcactatgctcatgcgtcacaaaaatgccgtctacatcatccagcttacgcccgatctgcgccatcagcccatccatggcttttccgctcaaaccggcgtccactaaaaatgcgtgatcctctgtttcgaggtaaaacgcatttcccgtactcccgctcgcaagtacgctaaattgcaagctcatgtttgtctcactccattattttcattgatctgtatctaaaatcgtactctccaaagcattcacagtaaaatactcttgtactgtctttttctcaccgttcacttttttctcgtactcgaccgtaattctccataccggcgccagcacctgcgtacttgtcagcggatattgtgctacatagccgaatttacagctcttcacagtgctgtattcttttaattgattttgatagtacaatagctcaaccgcatccatttcagtaattaagctttctttctggatttgcttgaaggtctcaagcgtagtctggtcgtatgacacaacctcgtttttaccgtttaagtgcagcaccacttgcccgatcatattagagggattgtcggtcttttggtaaatataatgaccttcgtacgtttggaagaaaataatttctttcttcgatttatcaaccttccaaagcttatatttttcgccatcttgaattttcgaagaaacaagtgcctgagcatcgtcctcgatatccttctttgatagtgcgattggatttgcaaacttcattttcaggctcgttactttatgatcatcactaggcatgtccatcaaaggcttttgatccttcagcgcctcaatttcctccttggagaaagacttttgatttgccgtgatccgatagccttctgttgcttccttattcaagccttcatacgtgatatgatcggccttcatgtcatgctcgacatcatttttaatgacttcatattctttgccggtagcctgccatttttgaaaaaactgatagcctaagaaaatatctaaaatgaggaaggcaacgatgaagattgattttgtcttattccactccactgttagccccctccttcctcaataaatcctttgtaatcggcacaatttttccatttactttcatcgcccaaaccggttccagttcaacgagaggatcatcgttggttgatgttgataccaattgataagcaaggaagatctgatcaattttgtccgtatcataagcggtttgtttcgaaagcagcatcttcacttcgctgccgcccatgagctctgtttcacttgttttaatcggattcgttccgagactgtaattcggccgcttatagctgagaatatcatcattcgcccattgcaccgtaatcgccgatgtcgccccgaaaggtttggcggtgctgttaatgaccgggatctgatccataaaaatatagaagctcaactgctggctgtcattgatattgaaaaattgatagtgatccgtccagcttccggtatcctcaaggtatttttggctctttttgattaattcacctgtttgataggatgtgctctgcaccaaattgcgctgctgaaattgcacctgtctctggcttagattcacatctaaccggctgatcccatctgtcagcacatttctgttgttgtaattcgaatcttctcttacaatgctcggatcactaaacaaagcctgcttaaaggtatttgttttaatcgattctgtgacaaattcttttttgtccatcgtaagcggtttgttcggcagcaagaactctttctttgagccaatggagaacaaactgaacgccggcatatttgattgcctgtttttcaagtcgttcataatgttccggtagtttgctgattcaaccgtcacttcaagaatgagctgcttgctgtatgacaccaaatagattttcttgttcgcttttgtttcattgaacgggatcagaatatggtcaaacgaactgtattcaaacgactgattagaccatttaaacagcgtttggaaaatatcaatcgggatcgtatcgctgaattgcaagtcaagcttggcttcagaaccgcctattccataaaaccagcttttgaatccagccttgtcatactgatccgaaatatctttaattcctttcacatcccaatgcggcaagtcagaccaaatttcttcatagagggcattgtcatccactttgtaatgagcgccgtcatcatggataaacatgtcccttggccttaccgtttcagacagcttttgggtggttttttcgattttatgtttcacacgaacagtagactctgttgaggatgagccttcagaaaagtttggctggaacgtccatatcccccatgtaaaaacaagactgatgacgacgagtaccgtaagtaatatcgtttttatattttcacgcttcatcccaatcatcctcttgttcctctttatatggaagagtaaatgtaatcgtcgtgccttttccttctatgctgtccgcccaaatatctccaccgtgcgcctgtaccatttccttggcaatcgccaatcccagaccggtgccgccaagctttctcgttctcgctttatccaccctgtagaagcggtcaaagactttttcgacatcttttttcggaatgccgatcccttcatccttcacgctgatatagagaagttcttcctcttcattgacatcaatcgagaacgtgacatgtccgccttccggtgaatattttaaagcgttagaaataatattatcgagcacctgcgttattttatcctggtcaatctcgacatacagatctctgtccggcagattgcggataaactccacatgctgctcttttgtcatttcaaaacggtcaataataagtgacataaaccggacaatctgaatccattcccggttaaattgataatctttactgtcaaatttcgacagctgaagcagatcattgacaagccggatcatacgctctgtttcattttgcgtcaccattaagaagcgcggagcaatgtctttattttcccacgcgccttcagctaacgcttctaaatagctgcgcattgtcgtaagcggcgtccgcagctcatgtgatacattcgcaacgaattctctgcgttcctgatccattttctcttgttcggttacatcgtaaatgacagcgattaaaccatcaattttgccgtgttccctttgaatcacagagaaattcacgcgaagcaccgttaattcatcatcgcgctcaatttcaagcagcatagaatcctgctgttccactaaatcttcaaaagtataattctcttgaagccccagcaaactcgtaatcggcatttctaaggctgtttcacgtgaaacgttcaacagttccagcgccgggctgtttaagagaataatcgctccgtttcggtttgtggcgataacgccgtctgtcatataagcaatgacagaggctagctttctgcgttctccttcagtcatcgcctgggcatcttcaagctctctcgttaagtggttaaacgttgtggccagctgcccaatttcatcatgtccatactttttaaccttcctcgagaaattccctttcgcaagctccatcgcctgctttcgcatatctgaaagcgggtgggtaatggttcttgccagaaaaataccgagaagagccgtcaaaacaagtgccaaacctgtgccggacgccagtatcgtgttgatcgtcttcatttgattaaagacatcttccatactcgcgacaacgtagatcgcgcccacaacctcttggttttcagtcatgacgggcttcgcggaaataagaactctgattttgcttttcgggtcataatattttcttaaatacgactgtttggtagaaaagattcttttgaaaatcagatcggtcgtttgtttcccagccacttcctcaccgtacggctttgaagaaccgaccacttcatagcttttatctacaaagctaatttcccgaacctcatcacttttcgtgaagtcattcaaaatacggctgacgtcatcctttatgacggtactgtcgttatcgctcttatattcttgttcgatataataagaaaggttgtcgattcgctgattcagcgattgttcataagagctgatcagcgacttctctacctgattgacaaaatacacaccaatgatttgcatggcaatgataatcaaaagcacataaatcaaggtaatcttaaattggatcgaccgaaaaaaaccaaccttattcatatgggcattagtcctgttctgggtttctcaagtaataacctacaccacggcgtgtgacgatccaatttggatggctcgggttgtcctcgattttttcacgaagccggcggactgttacgtcaaccgttctgacatcgccgaagtaatcatagccccaaacggtttgaagcaaatgttcacgggtcatcacttgtccgatatgttttgctaaataatgaagcaattcgaactcacgatgagtcaattcgattgtttcgtctcgttttgatacaacgtacgcgtcagggaagatgacgagagagccgatatgaatctcgttagaggaaggctcttcctccgcaggcgctgttgtcagctggcggcgcaggttcgcttttacacgcgccaagagctcgcgtgtgctgaatggttttgtgacatagtcatcagcaccgatttcaagcccgataaccttgtcaatttctgaatccttagccgtcagcataatgattggcatatcgtatttctttctgacttcgcggcatacttcaacgccgtctttatttgggagcataatatctaaaagaattaaatcaggctgaagctcttctaccatttcaacggcttcgtttccgtcgtgggcacagtgcacttcatagccttcttttcttaagttaaattccaatatatctgcaatcggtttttcatcatctactacaaggatctttttatccatcattttgattttcctcctgccgaatgacttcatttcatctatataacattcgtttcatcacttatggcccatgtaaagaatgggtccttgtctattataacggtttaaggtcaaaagataaaaaaaataaaggtttagaaaaaaaacacatgtttcacctttatcgccagttgtttatctattgtcatgctggtcaactttttttaaaaaagataactttattgaaacctcccctcaccggagtgcgtctttatcaatgacgtcttcttctttgaaccggccgcagggccggttctccctttttcttctattataacactcctcatgtttgcctttttcctaaaagaaaaaacgcacctacgattgcagatgcgtttggtaagtggctcgggacggaatcgaaccgccgacacacggattttcagtccgttgctctaccaactgagctaccgagccaaatgttttatttttctctactaagtaaagtaaaatggcggtccggacgggactcgaacccgcgacctcctgcgtgacaggcaggcattctaaccaactgaactaccggaccttacagtaattgcccggagagctgtcgtgtcagctctcacagacaaataaggaatttagcaataacgctaaagtaaatcaatgacccgtacgggattcgaacccgtgttaccgccgtgaaagggcggtgtcttaaccgcttgaccaacgggccttcacgaaatggtgagccatgaaggactcgaaccttcgaccctctgattaaaagtcagatgctctaccaactgagctaatggctcttaaagatgtcggaatttctatagagcaaacgacttaaatctagttctcatcttgtactctattgaagcagtttccgtaacaacgagatttataatatcacgaacaaatagaagtggcaataacttttttggttttttttcatatttttttctcagaccaacttatatgcggctttcaaacaaaaaacaagccccttaaataggggcttgcagacatattctatttagttcgcacggtacacactgcgaaggacatttgtttgtgagcggtctggaccgacagagaaaatagaaagcggaatgcctgtcagctgagacacacgctcaagataatggcgcgcattttccggaagctcgctcaagctcttcgcacctgtaatatcctcagtccagcccggcatttcttcatataccggctcacattcagcaagtgccttaagacttgctgggaattcttcaatgatttcgcctttgtagcggtacgccacacagattttcaacgtttcaattcctgctaggacgtcaattgagttcagagaaagatctgtaattccgctcacacggcgggcgtggcggacaacaacgctgtcaaaccagccgacacggcgcgggcggcctgttgttgttccatattcgcgtccgacttcacggatttgatcgccgatttcatctttcagctcagtcggaaaaggaccgtcgccgacacgagtcgtatatgcttttgatacaccgacaacgtgcttgattttggtcgggccgacaccagaaccgatcgtgacaccgccggcaaccgggttagatgacgtaacaaacgggtatgttccttggtcgatatcgagcataaccccttgtgcgccttcaaataatacacggcgcccttcatcaagagcatcgtttaagacaacagatgtatcgcaaacatactttttaatctgctgtccgtactcataatattcgtctaagatatcctcaagtttaaacccttctgtctcgtacattttctcgagaagacggtttttttcttcaagattgcgctcaagcttttccgcaaacgcgtcacggtctaacagatccgcgatgcgaattccgatgcgggctgctttatccatgtaagcagggccgattccttttttcgttgtgccgatcttgttagcccctttacgctcttcttccacttcatccaatttcaaatgatacggcagaatgacgtgagctctgttgctgattctcaggttatctgtactcacgttgcgctcatgaagatacgcaagctctgtgactaatgctttcggatctacaaccattccgtttccgattacacacgttttatccttatagaaaattccagacgggattaagtgaagcttatatgtgattccgtcaaacttgattgtatgccctgcgttatttccgccttgataacgggcgatcacttctgcattttctgataggaaatctgtaattttaccttttccttcatcgccccattgcgtacctactacaactactgaagacatgtccgtgcacctccgttaacctttcaaaacgattctattcaaacaaatcaagtttatcagtgaagaaacagaaagtcaattgtaaatccgaacattaatttattgtaaatctatattcgttcgcttccattcgttttataagcgttttctcactgctttgtcataaaaagcttgcgaaactttcatcctttagcataagaaagaatcacttgcctgatatcccttttgaattcataaaaacgatccgccagccgtccgggtcctctatcgtcacgcccccattgctccagtacgggttctctgattcgacctcttgatagcccatgtgctttagctttgaagtgatcgctgccagttcaactgcattcggcacataaaaaacaagaaggctgtcgggatggggaacgggggcagtgcttcccccttcatactgggtgaattccaaatgataatcggcatgaggaaggccgaacatgacaccgtcatacccgttatgctgtgaaaattctcctattcgtttcaaacacagtccctcttcgtaaaaacgaataatctcatcaagctggcccgtaggacgcgcaattcggatttgtgctgcttgaaaagacgaaaaacgttttcccatattgttaccatctcctttttgcaccattttattaaaacgctttcaatttttcatccgctgagcgaacgtcatttcttccatctttcgaatgaaaaaaaccccaagagcagctcttggggcttatgcgccgggcggaacgcctgcgtcatcaaaacgccgttccaggttgacgaatttgttgtattcttttacgaacgcaagagacacggttcctaccgggccgttacgctgtttggcgataataatttcgataatatttttattctcggtttctttgtcatagtagtcatcacgataaaggaacgcgacaatatccgcgtcctgctcgatacttcctgattcccggatatcagacatcatcggacgtttatcctgacgctgctcaacacccctggaaagctgagaaagcgcgataacagggacttgcagctccctcgcaatcgacttcagttcacgggaaatttcagatacttcctgctgacggttgtcctttgaacgaccgcttccctgaatcaattgcaggtaatcgatcaaaatcatgcccagcccgctttcctgcttcaagcggcggcacttggcacggatttcactcactcgaatacccggtgtatcatcgatgtaaatcccgctgttcgataggcttcccattgccatcgtcagcttgccccaatcctcttcggtcaggttacctgtacggagattctgggcattgatatttccctcggcacagagcatacgcataacgagctgctcggcacccatctcaagactgaaaatcgctacgctctcatcggtcttcgtcgccacgttttgtgcgatgttcagggcaaaggctgttttccctactgaaggacgggcagccacaatgatcaagtcgttgcgctggaaacccgcagtcatccggtcaagctccgtaaaccctgttggaattcccgtgatatcaccttttcgattgtgaagctgttcgatattatcataggtctggacaaggacgtccttaatattttggaaggcactcgtgtttttgcgctgtgccacttccataatcgttttttccgcttcactgagtaaatcctcgacctcatcctcacgggtatacccgtcttgagcaatcgttgtcgcagttctgattaatcggcgaagaatcgatttttcctcaacgattttcgcgtaatattctatgttagccgctgtcggcaccgagtttgcgatatctgtcaaatatgaaataccgcctacttcttccagcaggtctgtgttcgcaagctctgatgtaactgtcaccagatcaaccggttcacctcggtcaccgagcaccagcatcgcattatagattttttggtgggacattctatagaaatcatctggaatcaatacttctgaagccagtgttaaagcagacggctgtaaaaaaatagcgcctaacacggcttgttcggcttctatattttgcggaggaagccggtcattcagaaggtctgtcatgctaagcaccgtcctctcattaaaaaatctccaacctccattctaccatttctacagaaaaaaaatagaaaaattgtctgtttcctgtttttttcagttagcagattggatcgtttcggacagtaacaaggcgggaaaaatgcaataaaacataagggaggaatgaaagatgataaagaaatatgcgattacacctaatgttgatgcggacggctggtttattgaggtggagaatgtagcgccgacagctttgtatacgtctaaagacgccgctattgaaaaggccaaacaggtggctaaggaaaacagtccgtctaagcttgtaatttatgaccagtttaaaaatgtggaagaagaacactcattttaatgaatgaaagccttcgctgcagcgagggttttttagcggttatcggtttatttcatccattggatgcctatgtgcatcatcaaatctgccgctttttgatacagatcccactccccgatcgaagcaaatttccccatcagctcctgaagctttaacctcattgctatatattcttcgaaagtgacagctttttcagtgtctatttggtgttccttcagcatttgttttaataaggataacggtgcgtgcataagaaccctccttacctcttttataacggtcattttccgattgctctattcctttgtgacatcttcttacatttcacatctgattcttgtacaatggacagaagagaggagggatcttttgtgagacctttgcaaatttctgccgaaactgcacaaaagcttgcagagtccttgaatctgccgcttgaacagatcatgcatatgcctcagcatattctgcttgccaaaatggctgaactgcaaaaagaggacaaatcatagccttcattcacatacttgcttacctgtttcgggataatatcatgtatatgttagaaaagaggagtaactgctttgccacatccacataataaaaaaatccaatcattttggctgatcaccggcattatctttatcgcctttaacttacggcccgcgatcacttcagtcggtccggtcatcagctctatccgggcagagctgcacatgtccaatggggcagccggttttttgaccgcactgccgctgctttcgtttgcagttctttctccgcttgcacctaagcttggacagcgcctcggtaatgagcgaactttatggctaggtctcgtgatactgctgatcggtgttctgactcgttctaccggctatactgccgctttgtttttcggaacagcacttatcggcgtcgggattgcgattggtaacgtacttttgccaagcttaatcaaacataaataccctgaaaagccagggatcatgatcagcctgtatacgacatcaatgaatatattcgcagctttagcatcgggtgtcagcgttcctttagcgacccagatgaatggcggatggaaacaagcctttctcttatggggcgggctggctttacttgcattgctaatctggatacctcagctgcgccatcgagatacggcaaaccagacaatgaagctgcaatccagttccatttgggcttccaaaatggcatggtatgtcaccatctttatgggcctgcaatcgtttttattttacagcagcatcgcttggtttcctgaaattctccgttcacacgggattgatacggcaacagccggatggatggtatcactcatgcaatttgcgagtctgccttccacttttctgacgccagttttagctgaccgtgtgaaacagcagcgcggtatcgttgcggcgctggcctcagtttatctgatcggcctttgcggattattagcgggcggaagccatacattgcttgccatctggatgatcattatcggtatcggacaaggctccagcattagtctggcccttactttgattggtctccgcagtgaaaatgcccaacaggccgctgcgctgtcaggcatgtctcagtcattcggctacctgctggcagcagtcgggccaatctttgtcggctatctctttgaccagacgcattcttggacgatgccgattgtgcttctcattgctgccctgatcgtaatgggagcagccggacagggagccggacgagatcgatacattttccagtcagaaaaacaaagaaattcagcataaagcggggaagatatctccgcttttttctttgaatatttatggtttattcataagtttttcatatttgttttttacaatgagacaccataaagaggtgaaaaacgatgaaaaccaaacgattcgacgcagcccttattcttattttgctagcagcagcttttttgaatacgtatcacatttggcaggatgatacagcaaaccagtactatttggcggctgtaaaaagcatgacgcaaagcttccataactttttttatgcgtcatttgacccttctggatttgtgacagtagataagcctcctgtcgtgttatggattcaaacgattttcgcactgattttcggtgttcacacgtggagtgtcatcattccccaggctcttgccggagttggatctgtcttccttctctacagaatggttaagccgacttttggagttggagcggcccgcattgccgcacttgtcatggcactgacccctatcgcagtagctgtcagccggacaaacaatatcgacagcatgcttgtttttaccttattgctcggttcaacttgtctgcttagggcagtaaaacaaggcaagctggtttggctgctgacggcatttgccctgattgggctcgcctttaatatgaagatgatgcaagcgtttatggtattgcctgcatttgtgttattctacctgattgcatctcgggtttctctgaagaaaaaaatcgggtccctgcttctgtctcttgtccttctgacaggcctttcactctcatgggcgattgcagtggattcagcctcttcctcaagccggccttatgtaggaagcagccagactaactcagtgctagaactggcctttggctacaacggcacagagcgtctgtttgggcaaactacgggccttgcaaagggtgatatgaatgctgctggcggagggaacatgcagaatcaagacaacatgcaagcgccaaatggcaacggttcatctttttctcagaacggtaatcaatcattcggaaaccattcacaggcgcctcagccgcctaacggacaaaccggcgctctcaatggaggcggaggcacacctcccacaggtggcaacggacctggaaatggagggcctggcggcggaggcggaaaaagcgtgaatatgttcggcaccggtgatcctggaccgcttcgtctcttccaatcagcactttccggccaaatcagctggatgcttccattctcattgatcggattactgggcgcaatcatcagctggtaccgtgatcgccgcggacatgctgctaaaatgaaagaaacgctattctgggcggcttggcttgttcccgtggctggtttcttcagcatcgcaggattcttccaccagtattatttgattatgctggcaccgccgattgccgccctttctggtatcggatggtatacgatgcaccgcttatacaaaaataataaagactggtccagctatcttctgccggcagccgtcttgatcacagccgtgtttcaggtgtatattctgagcgcttatacaagccaaatcggcagtgtatggatgtatgtcctggggctcttaggactgggcatcacccttgcacttctgatgcttaaacgcagccatccgttcagtaagctgctgaccatcatcagcttgtgcgttctgcttctcacaccagtttactggtcagcaacgccgcttctatacggtggcaacagcgtccttcctgaatccggcccgcagctcaaaggctcagcaaacggcgggaacatgttctcttcagaggtcgacagcgggctcctgtcctatctgagaaaacacaataccggcgaagagtatttatttgctactttgacaaccgtaacagctgcgccatacatcatttacgaaaatgaatctgttatggcaatgggcgggtttaacggcacggatcccattctgactgtgtcggaactgaaaaaactgatcaaagaaggcaaagtgaaatacttccttctgtcagaaaacaactcaggcaacagcgaacttgtttcctggattaagaaaaacggaaaagaaataacatctgacgagtacagcggttcctccagcagcacaaacagcgtgcagggaatgcgaagaggacctggcggagaaagccagcaaactctttatctcgtggaataaaaaaagaggcttggatgaatccaagcctcttttctattaagcttcttcttttacatgtacctttaacacagcctgcacttcaggatgcagcttcacaggcacgtttgtatatcctaatgcacgaatgccgtccggcagttcaagcttccgcttatctactttaatgttatggtctttttggagctgttcagtgatttgcttgcttgtcactgaaccaaataaacggccgccctcacctgattttgcgctaagctcaacagtcagtttttctaatgtctctttcaagctcttagcctgctcaagctcagcaatggcttcttttttctctttctgcttttgtccgtttaacgcgctgatgtttgacgcgttcgcttcaaccgcgaggccttttttaattagaaagttatgcgcataaccgtctgctacgtttttgacttcgcctttttttccttttccttttacatcttgtaagaaaataaccttcatctctgtacgcctccctcaaaatactcatctatggcgtgcttcagccgttccagcgcttcagaaactgaaatgccggacaactgagtcgccgcatttgttaaatgccctccgccttccagggcctccatgatgatctgaacatttacctcgccaagcgaccgagcactgatacaaaccgtttgttcatcccgtctcgccaccgcaaatgaagcctcaacctcactcatcgatagcagcgaatcggcagcctgcgcaatcagcacttgatcgaagtattcctcttcattttcaggaagagaagcaatcgcaatgttatctttatagaggaccgtatgctggatcagcttcgcccgtttaatataggaatcaacggtttctttcagaaacttctgcaccagcaccgtgtcggcgccttttgcccttaaataagaagccgcatcgaaagtccgcgagcccgtgcggagagaaaagctctttgtatccactattataccagctaatagggctgttgcttcaatcatattgatttttaagcgcttcggctgatattcaagcagctctgtcaccaattccgctgtggaagaagcgtatggttccatataaacgagcagcggatctctgataaactcctcacctcttcggtgatggtcgatgaccacgatatgttcaattttattgaccagccgttcctccatgacgagtgacggcttatgtgtatcaacgatcacaagcagtgtgtcatcattggaaatctccattgcttcttcaggcgtaataaatcttgaccacagttcttcatattttttgatttccccaatcaaacgctgcacacttgatccgatttggtttgggtcaatcacgataaaaccatctttgttatttgcctgagccacctttaaaatcccgatcgctgcgccgatagaatccatgtcggggaatttatgccccatgataatcacattgctgctttcggtgacgatttcctttaaggcgtgagaaatcacgcgggcccgcacccttgttcgtttctccattgggtttgttttaccgccgtaaaacttcaccttgccgtttggcagcttaatggctacctggtctccgccgcgtcccagtgctaagtccaagctggattgcgccaaatcgccaagttctttcagggaagagactgaagccccgacaccgacgcttaacgtcagcgctacaccgtcaaacgaggttttttcccgcacttcatcaagaatcgaaaacttcgaattttcgagttcagttaagatatgttcattaagtacagcaataaagcgttctgaagacgtccttttcaagaagatcccgtactcctgcgcccaagcgttcagcaaagatgtcacctggctgttcatcgtgcttctcgtctggtcatccaatccttgtgtcacatcatcatagttatcaaggaaaatatatgccaggacggttctttcgttttcatatagcttttcaatctggatttgttctgttacatcaaagaaatataagagacgctcatcccgtttgatgacaaccctaaacttgcggtcattcaatgtaaccgtttccgattccacctcttgtttgataagcggcactaccgattcacaagtatcgtaaagtgatctccccactaaagtgctttcattaaaacaagaggaaagaaacggatttgcccattctatataatattggtcattaaaaagcatgattccaatcggcatttccatcaatgcctcttcaccgacttttttcaacctgtaggacaacgtagaaatataagcatcaatctcttgtcgaataagagaatcagcacgcttaataaaaaacaaaataactgccagcagcagcacttcgacggttcctaatatccagttaaaataaaagctgatgaggattgtaataattgacagagcaatcaatgcatagatgggataccgaaacagcggtttttcataaaagcttggcatttctatcactccccaccatgtgagtaaaactcatgttcacttcaccttattccttatatgaaagcccatatctaaaacgcctaaaatgcgaatggccgccatgaagaccggatgcacaaacccaagtatgacagcaatcacagccgcagcctttggatattgtttcttatggcaatagaaaaagataaatgataaaccttggatgaaaatcagaaacccgagtataaactccccatttaaagcgatagagtacagcatttggcctttttctaaaggcaaaaatgaaagcatgacaataatcaaatacagtactacaacactttgcggaaacttcaactctctaaaaggctttagattaggaatatcgggggagaatcgccttaagagcggcttagcgataaggtaactgaggaaagaaaaaataactcctaccatcacaatagctgttggaaaaagatattgaacgatacccaattgttcttccatcagttttaattgcttctcaaactgcccagcattgcccgactgcttcgctacagtttctacaatatcaagagattgccggtattgtgtcattgcctcatcaatgatattgatacccaaaaactgaatgcttatcacaaaatagaagacaatactaagcatataaataagagcgcccgaaataatggcgtgcccgggctctttccttttgaaaaaatgtcccatggcaatgccggcgcaagctgacataaaagctacaataagcccgttaaaggacccgacaataaaaacaaccggaagactgacagcgcccatccatatccctagcttcaatccatgtctgatcgtatacaagatcattggcagcggcagtgcaaataacagaattgttccaatcacaggaacataaacgaccagaagcgtaatgatcgcaaacagactgattaaaatagcaccttccattaaagctctcgtttgtttcacttagtcacctcgtatcatcctgaacatacgaatagaaaagagcagcataaacgactgctcttttgttcatcgctgcaacatgctttgcaccgaatgtttttatatcatctctaaattttacttttatattttaacataagtccaaatcgcaagtaaaatgacgctaatgtttcatgtgaaacatgaaaaaggaaaagacattctttgaaaagaatgcccatcacaattaatgtttatcatccataaagccagaagattccttgtttttctttttcgtttttctgacatacataaaaattaagatcaccagtaaaagggttgttgcttgcagaacgccgctgctaaacaagaaaaagttctttatcatgtcccacattgtgtttcacctctttgtgcatgttctcaacccgtatcctatataaggtgaatttccctttttaaaaacttcaaaacatcatgaacaacattgagcgttgggcatatgctgatatggaatctgatcgataaaggagaattttcacatggatgaacgcagaacattggcttggcatgaaacattagaaatgcacgagctggttgcttttcaatcaaacggactcattaaactgaagaaaatgataagagaagtaaaagaccctcagctcagacagctttataacgtgtctattcagggtgttgagcaaaatttgagagagcttcttccgttctttccacaggctccgcacagagaggatgaggaagaagaacgcgcagataacccattttacagcggtgacctgctcggttttgccaaaacatctgtccgcagctatgccatcgcaattacagaaacagcaacacctcaattaagaaacgtactggtcaaacagctgaatgctgccatccagctgcacgcccaagtttatcgatacatgtatcagcatggatattatccgtcttacaacctttctgaactgttgaaaaacgatgtcagaaacgccaacagagccatttcaatgaaataaaacaagcagcaaaggagttccctttgctgctatttctgctgatccttcactaagccgttcgaacgataagattccagcacgtctctgttggattctccccattctttcatttgcaaaacaatcggttcaagcgtgcgcccaaattccgtcagagagtactctaccttgggcggcacctggtgataaacctcacggtgcacgatgccgtccgcttccagctccctcagctggagagtaagcattctttgagtaatactcgggcagattcgccgaaactcattaaatcgtttcttgccatctatcatgtgataaaaaagaattcctttccactttccgccaatgacatctagagtgaattcaactggacagccttctttgttcgggtatatattctttttttcactcattcttgaccctccaatagtaccttttttgatactacattacattttgcaactaatctacccagtattttacacaccttttctccttagctcaaagaaaatgcttcttattcacatcaatttttaagggtttgcatgattacacctgcagcaagacgtgttaaactatataaagattacactacttaaaaaaggataggagctatcatggaaaagatacttattttcggacaccaaaacccagatacagatacgatttgttctgcgattgcttatgctgatttgaaaaacaaactcggcttcaatgctgagcctgtccgcctcggacaagtcaacggcgaaacacaatacgcgcttgactatttcaaacaagaaagcccgcgtcttgttgaaacagctgcaaacgaagtaaacggcgttatcctggttgaccataacgaacgccagcaaagcatcaaagacattgaagaggttcaggttttagaggttatcgaccatcaccgcatcgctaactttgaaacagctgagccgctttactatcgtgctgagcctgtaggctgtacggctaccatcttaaacaaaatgtacaaagagaataacgtgaaaatcgagaaagaaattgccggccttatgctgtctgcgatcatttctgattccctgttatttaaatctccaacttgcacggaccaagacgtagcagcagcaaaagagcttgcggagatcgctggagtagatgctgaagaatacggcttgaacatgttgaaagcaggcgctgatctaagcaaaaaaacagtggaagagctcatttctcttgatgcgaaagaatttacactcggcagcaagaaagtcgaaatcgcacaagtaaacacagtggacattgaagatgtaaaaaaacgccaagctgaattagaagctgtgatctcaaaagttgtggctgagaagaatcttgatctgttccttctcgttatcacagatatcttagaaaatgattcacttgctcttgcaatcggtaacgaagcagcgaaagtggaaaaagcgttcaacgttacattagaaaacaacacagccctcttaaaaggcgttgtttcccgtaaaaaacaagtcgttcctgtcttaacagacgcaatggctgaataagcaaaaagcatcccgcgtcgggatgctttttcttattcacccagcttctcaatttgtcccatcacatcagtaatttgctttgcgttttggaccaggtctgactgctccaattctttaagcgataccttgccttcctcggcttgtttcaacacatcttcagcgcttttctgcaaggtttcgttatgctcctgaatggttcgatgaatctccgctgcggcatcaggcggcgttaattcattaaaatcagcggcagccttctgaatcgactcaagctgcgcttcaagtttttctttcgcctcggtgtcatttacagctttctcagccaattcaggcgcttcctctgcaaatgtcttcaccttctccacataaccagctgcttcactcgtatagttcaatccgtcgttcacctgatcaagcatgccgcatccgcctgcactcaaaagtcccactccggcaagtactgtcaaaatgatcttcatcttcagccccctcatcgtttctttttcattttttcttttaagatcggaatcaatttctctttcgctaacggcagccctttcctcaccaattcacgcttcagccactttttcagcttagacattctgatgctcctctccctttttgataaaaatgaaaaaactccaccaatttggtgaagttcctgaaacaaaaagaccttcaccaaatcagatttggcaaaggtctcgctaacaatgagattgccagcaaagccgaggacaccttgtcccgtaatgacgactttactgtgaaagctactcccctttggagtgttcatttttattactttcattctaaagcaccgatctgttccagtcaaattcctgccgtttatataaaagcgcgctgtggtatttaaaatttgaatggtttttctatcaggagatcatgctatgacagaggaggttttcatcatgagtcaagagcgcgtgaaacggcctgggcataccagatggtacatatcttcgttacttagcggcattattattcttaattattttgaccgagtggccatctcggtagcggcccctgcgatacaagattcgtttcaccttactgcaactgaactcggcatcgtgttttccatttacacctattcctatacactgatgcagctgcctgtcggaagtttgctggaccgttttggggtcgcatgggtcacgagggttggaatgacaatatggagctttttaacgatccttcttgcttttttgcaaggaaaattgctgttgtatctgttccggtttctcattgggctgacgagcgcctctgcgttccctgctgcctctaaagcaaccgctctctggtttcctccaagtgagcggggattggcaaactcactgttcgattcggccgccaagttttcaaatgtaatcggcgcgccattggtcgcctttcttgtcacaacatttgactggcgtgtcgcttttttgacgattggatgcatcaatgtgctgtttacgatctttttctggcagtattatgaacagcctgaacggcacaaacgcatttctaaaagtgaactaaactatattcaaaaacacaatgccattacaacagagcaaatcccttacaaaacgggcccgcttttaaaaaagcttttcaccaatcgaaaagtatggggcttaatgatcggatttacagggtacgggtatacattcaacctgctgctcacctggcttccgactttctttaaacatacatacggtatggatctcatgtcgtccggtttatttacggcagtgccgtggctgatctcaaccatttccggaattgccgtcggcggctggctcgtcgattattttattaagaaaggctatcctaataccaaggtgtaccgaaccgtaatcatagtcggaatgagctttggctttttctttttaggatccattctgacgaacaatattaccgtagccattatttgcatttccatcggactcgccggaatttccgcaaccgctccggtcggctggtccatctccgcagaactcgcgccgatcggttccgtatccatgctgagctccatggtgaatctcgcaaacaacctgttcggaggcattattgctgcgtcactgacagggtatttgtttgatgtgacaggctcctttaccctcagctttctggtagctggttttgtgctgttgctgggattggttttttatgtgtttgtattaggggatgtaaaacgaattaaactatagaacatgaaaaagagagctgccagttggcagctctccctttacatcaaagaatcggcccgtccccatttaccttctcctcgtcctgttcctctatatcaagccccgaagctagcatttcctgctctatctgttcgagcacctgctcgttttttccttgaagaccaccttcataatgaaaagcatcctgtgtgccgttttcctctattgtcgctaaaatatcgtggatatcattatggtctcctgaaatggagccgaatccctggttttgttttttataattcacaaaaccgctggggaggttgtttccgaggtttacacatgatgcgctccgagtagtaattcatcagtgtatcaaaatcttcattttggattgccacatcacatgcagagatgatgtctttcaattgctgttccaaatgaattcccctaatcatcatgattggatatattatacaatgtttgacacgtagggatccttttcatttttgtttttacggtttcgctggtccatttccgcagagctggcgccgatcggttccgtatccatgctgagctccatggtaaatctggcaaacaacctgttcgaaggcattattgcggcttcattgacggggtattttgtttgatgtgacaaggctcctttacgctcagctttctggtagccagttttgttctgctgcttggattggttttttacgtgtttgtcttaggggatgtaaaacgaattaagcgggaataaagagtgcttgtagagaaaacgttgttctttctacaagctttttagttttgtgctgtttttcaagatattcagctgtcataaaaagaaaatgagctcccacataccggctaggtatgtggcgttcttcttcatgttctggcatgcagctgtgaggaggatttgtttgctcaccccctgaacctgcgatagctaagcccgtgcagttgttttgaacctacaaagcttcgttctattttttcttttctttttttagagatttcctgaaatagaaaagcaatcttttctaaccttttctttatggttttgccatacataccgagtaacgactttctggcgtttcgttgattttgtgtaatattctcaaacatatttcaggatttgatttatatgaccgatagtctttgcgatcaattgttgagtacgtaagtgtatgctgattcaacaaatgtatctgtattgttcactttataatgaaatttccattttggaagcaaacccctgactgggtgataacgtctatgtgcgatggcaccaaaaacttggaggtcaaatagtcctttagagatgagagttgttaagtagccggaatctagagcgacggcttctacttgaaaatcaaatcatgcaatttagtgatccaatcggtcaaggtagggcttggaacagaatcatggacttttctggagttgcaaactattaatcgtcctcattaaatttataataaaaatattctcaattgagcaaatcgcccaccctttttcctttataacataaaatccaatactatcaataaaattctttacaggttattacagttaagatataatatagttaatcttttacgtaaaaggaggtttttattacttgtgttgaagttttaaataggagtaactccatctccccattacggtcttcatttaatttcatcctgagttttatttagttagatataaaaacgaaaatttcacattatttttaactaaccgatagtataaaatatatattgaaaggattgtaaaattatgaataaattcctgaagagcaatttccgtttccttcttgcggctgctttaggcatatcattacttgctagtagtaattttataaaagccagcaatgataactataaattccatttacttgtaccttatggctatggtaatgcctattcaaatgatgcatttagacagaccactcatacagataatccttggaaagtaaatttacagaaatcggcagaaggtaaaggtacaatcatgacattttggttgattaacacagggaatagtaaaattccaaaagcttctaaaatacataacgtaaaacaaggaagcggagctcattattatcatgcaaatagccagggaagccatacatatgtagccttagcagttgaaaacaacaattacagtgcaagttcttatggtatagatggtgtatgggatgaagaaacttggtaaacaagaaccttctaaaaacgttggcaccttttagccacgcgaaaaaatttagaatgataatctttttataagattatcatttttatttattctattaagaattgagtgagaacatggaaagtcatatttatcgcattatcaaaaataaattaactataataatatttactataatcatattaattccttgtgttgatatatcactattgttaatgactaacacagaataccatcctgcatatgcgtttttcctttctggcacttccgtagggcatgcttcacaaatgatcctattatggtttcttccgctttattttttgttactatgtgctgacgattctatacaagattataaaacaggatatcattacattcttataagcaaagttggcagaaaaaaatattgtttggaaaaaatatttacctcttttatcatttcatttttgacaatgtttttgtcactaatattaaactttttattggttcaggttttcttttttaaaggtacatttaaaaatgacttagaccaaattaaattccctgataacagcctttatacttttagtatggcccatccttatatagcaattgtgttattttctattatttgttgtattatgtctggatttgttggagcacttggttcaagcctcagtttactttttcgtgataagaagtatgcctacccagcaagtttttttatttggttcgtacttatactaaaaaacaaatcattaatgtttttattccaaccgtttacagaatacggttataatgtacttctccctatcctatgtttgtctatctttatttttctaataataatttctagtattgttttatatgaggcaaaatacaatgaaaattaaaagactactattaattttatgtttactactatttttagttactttatggttcaaccagaaccacacttatcttggaaagaattctatcgcgtcattactatatatgaataatagtacattcggatatagttcaatatttgcatataccttgttttatattgtcccgtttcttatgttacttagtaacttttttcattcagaaaacccctacaaagtaatgaggatggttaagcgtaaaaattactacaagtctaaaattatggagattgggtttgtttctttacttttttcttcaatacatactgttattaatattacgtgtacacatattttctttagtaaaaacttgttggtcgaagcaaactttttatcaatttgtttattaaacatgattagtttagtgtttttctacttatcagtaggtattatgtttagacttacatacgatctgtttaattcagtagcattagcaatttttattgtgtatataattttagatagcttgtatttcggcgttaaattattacttcctaatggatattgggaaccctttagagacttggctatattcacaaatatgctcaatagatattggtcaacttcaaatcttataatagtttatattagacagataataatagtttttattttttatttagttggatcttcaatttttttgaataaggattataaaaaatgaggattaaaggctttttcataactttagttgcgataatatttcaggcgtcattatcgagttataataataataaaaatgtctttccttttttagatggcataccaataagcacctcgggtcattatgagtatcaaaatattttattgtggtttgtacctattgtttccctaagtttttgtttctctgggagtattagagatacatacatttcgtatgagcaattaaagttagtaagagaacatagtagagttaaatgggtaacatctcaattcttaataattacagttgtacttttaatctttactttatctcagattgctatattttatatttattcacttgtatctcttcataaccttgatattaattccgttatcaataaaagatttgttatgatgacactcatgtattatctaaccttacttaacttatttagttttcaattatttatggagctttattataaatctcaaatagcacaattaaatataagcgtttatattattttttcgttaattttagcaaagaagttagtgcaattaaattctccgaaagttattcactactttttaattccaaactacagtaatggattaagaactgggttaagctattattcccaatctggaactgctattattgaaccattattaggtttgtttattataatcattttacagatttcaatagttatattatctgtcttaaagttcaaaaaaatagatatgctaaaaagtgagggcttacaatgattgaggtattaaacctaacaaaaaaaattaaaaagactacagttttagataatatctcttatacatttgaaaaaggaacaatttatggactatttgggagtaatggttctggaaagaccatgctacttcgtgcattatccgggttaatagtccctactgaagggagtataactattaaaggtgaacaattacataaagatatctcttttcctaaaagtgtaggattaattatagaaaatatgcagttacttcctcagtatgatgcttttactaaccttaaaattttgtcaaaaattaaaaagatcgcatcagataatgatatattagattctattagtagagttggtttggaaaattttaatagtgtaaaggttagtaaattctcgttaggaatgaaacaacgattaaatattgcacaggctatttttgaaaaacctgatatattgctacttgatgaaccaacaaatgcgattgatgaaaaaggagttgcatttgttcatgacattcttttacaagagaaaaaaaggggagctaccattattattactagtcatcacaaggaagatattatatctttatgtgacattgcattagaaatgaatcatggacgtctagaaacttcagaaaaagtaatatataagaaagatagttagtttaaactggctatttcttatccaatgatagactgcagacaagttcaactgctgtaatgctagaaaatccaatgaaatgctgataattgcgaagagatatgatcagtcagaaaacaaatcttaaaaagaaaaagtaaattcatcaatatttctaataaacctggcaaacaacctgttcggaggcattatagctacttcactgacgggatatttatttgatgtgacaggctccttacgctcagctttctggtgccggttttgtgttgttgctgggattggttttttatgtgtttgtattaggggatgtaaaacgaattaaactggaataaagagtgcttgctgaaaagcactctttttctgcatcgaaagaatacttaagataagtcactcccaaaaatcgtaacagtctgacggttaaacataaacctctgcccgttccattttaatacggtttgaacatatcccaatgagtcggcgttataccttcccgctatccgctggtacgccaataattcgtatacgccgtctctgtcaaaatcaaccggatacaagcccgataaaggattcacccatccttctatcggcatttttaacacaccttggctgttataaatctcattcaaatattccctgcccttgtaagtaaggtcgaggatatacgtttcgttttgctgatgactgataacgctcgctttatattgattttgatacctcacactgtactttaattcatcattcaatacatctgaattgaaaattcgccggaactgcctgtttagataggcaaacacatatgcataaatagcaccgccgcttccccctgtgtccattactactgccacatcctcaatcttgtcgcctgtcatatcccccagaaaaagtgacggattgtatcccatattgttttgaagctgaatccgctgctcctgatgggttctgccatcacggatcaccaatgtgatatttctccataacgggctgccgggcatttgatttccagttagaaagacctcgtcaataacgccgtctcccgttacatcgccgcgggtagatacaatgattgcacgtgaggagacaggctgccgaaatacgtatggatgttgaacaagtcctctgccttcataaaaccaataaggagccattctgatgtcatacacattcaattgtgtcaccttccctaatcagctgaatgaatcattatatgcaggaatggcacatcaaagacatatcttacacaccaattaaatccgtaccatatgaattatcaattacacaaagccactcgccttgcgcattctttttaaatacataggtcgcccttctttccatcgcatactcggagtcctttttatccgaatcaagcagtgtctgagaaagaacgagtaccgtgtcacctgcttccaacaggatcattttcccttgtgtcgggacaatatgatgattgaaatagttcgcaatcgtgataaacgcttttttgatttcttccttgcctcgcgcgatcatgcccggcttcacaactaaaacggcatcttccgaataataattcatcagtgtatcaaaatcttcattttggattgccaaatcacacgcagagatgatgtctttcaattgctgttccaaatgaattcccccaatcatcatgattggatatattatacatcgctagaccactgaaaccttgaaaacaaaatgaaaagtatccttttttcctatataatcaaatagatatatttaacaaagtacccaagtgaaggggtgaacattattgtctgcggaagtaacgttacatgacaatatacattatgatttaagtgcggattgccagcactgttttggcctgtgctgtgtcgccttgccttatgcgaagtcggcagattttgcttttgataaagacgggggcacgccttgccgcaacttacaatcaaactatcaatgttctatacataaagatctcagagaaaaaggatttcgaggctgctctgcatatgaatgctttggcgccggccaaaaagtatcccaaatcacttatgagggaaaggattggcgaaacagccccgaaacggccaaccagatgtttgacgtttttcctatcatgcagcagctgcacgaaatgctctggtatttacatgaagctctttctatagatatagccaagccgattcattctgaactgagaaccactttcgaaaaaatagaaaggctcaccagactcagcaaagaacgcttgctgacactgcaggtggacgagcatcgagctgaggtcaatgaatggctgttaaaaacaagtgaactggtgcgtgcccaagcccgccatccaaaactcccgaaaaaggtcagccggggaagtgtcctgatcggcgcgaaactgaaagggcttgatctgcgaggagcaaatctaagaggggcgctgctcatagccgccgatctgagaaatgccgatttgagaatgacagactttatcggtgcagatatgagagacgctgatctcagcggcgccgacctgaccgggagcatctttttgacacaggcacaggtgaacgccgccaacggcgattcgaatacaaagctgccgctgtctgtacgaacccctgcccattggaaataaaaaaggacccgctaacggtccttttttactgatcaattcaatcctttttcgttcctcttatccggcattttcacacttcttgccaagtatcccgacagccataacgcaaccagcagcatgaaggtgatcataccgacgacgcccagccagtgaaaaccagaccagaatagccctccgattgttccgaaaacacttgaaccggcgtaataaaagaacaaatacagcgatgaagcctgtgctttgttgtgaagggctctcctgcccacccagctgctggcaactgaatgccctccgaaaaaaccgaatgtaaagagggcaatccccagaattttcactgccagcatattgtttatcgtaaataacgcacctgcaatgacgatgaaaatattcatcaccaatattttcggatagccataccgatcaaccattcttccaatgaaagacgagctgaaaatgcctacaatcatcacaataaagatccagctggaaaatgctttattaagcgaatacggcgggcccaacagcacatacacaatgtaattaaacaaggcaacattgcttccaagcagcaaaaaaccaatgagaaacaagctgaatagtttacggtccctcaagtggccgatcagagacattcccaatttcccgagcttcaattttcttggcgtaaaatgcctggatggcggcaaatttataaaaaatataacactagcaatcaaactaatgacaccaattgtccccatcgccatatgccaattcaagtactcgctcaggagcccggaaacgatccttccgaaaacggcgccgattgcatttccgctgatatatagccccatcgctgatccaagacttccgggttcaatttcttccccaagataagccatcgcaatcgacggaaggcctgcgagcgcaacgccttgaatggttctcaatacgagcagtgtatgaaagctcggactaaaggccgatgccagacagagaaccgatgcggccagcatggaaatacccataataggcttgcgtccccacacctcggataatgaaccaaagacaagcatgctcacagctaacagcattgtggtaacagataaagaaagactcgccgcagtaggcgttacatgaaattcccgcgtgaattcctccatgagcggctgtacgcaatatagaatcgcaaatgtattgaaacccgcagcgaagaaagcaaacgtaatttttcgaaaaaccggtgtgccttttcgaatgtatgtcatcgggactttatcggtccctcatcatgttgtggagcactgccattcataaacaatcatcctttatttcttacgaattcaaacatcctcgagtctgtttatattattatcttagcaccgttgatatatgttgtataatgcatataaaatatccttttcatgcttatatgtaataaggagagatgataattggaatgggaacaacttgaatattttcaaacactggcccggatgcagcacgtcacgaaagccgcaaaaagcctctccatcacacagcctgcactttcacgctctatcgccaggctggaaaatcatttgggcgtcccgctatttgacaggcaaggacgatccatcagcttaaatcaatacggacacatttttttacgacgggttcaggcgatgatgaaggagtataccgaaggaaaagaagaaatccaagccttattaaagccagaccaaggcgtagtctctctcggttttttacatacattaggcaccacgctcgtgcccgatctcatcggctcctttcagcaggaataccccaacatttccttccagctgaagcaaaaccactcttattggctgcttgaacgattaaaatccggagatctggacctctgtctcctcgcttcgattaagcctgaaaatccgatccaatggatcaagctgtggagtgaagaactctttgtatttgtgccaaatgatcacccattagccagtcgcgaaagcattaccctgaatgagattgccggggagcgttttattttattgaaaaagggctatgcgcttcggatgacggtcgatgagctgtttgagaaggccaatatacagccgaacattatgtttgaaggagaagaagcaactactgccgcaggttttgtggcagccggtctgggcatatctattctcccagacctgaaaggcttagaccaaagcaaaatcaccaaaatccgcgtcagctggccggaatgtcagcgtgtcataggaattgcctggataaaaggcaggtttttatcaccggttgctgagacctttaaacaatatgtgatcagccatttttctgagtaggaaggattcaagcatgaatgtcaaaaaaatcacgtcagaacaggatttacatacagcgtttgaaatcagaaaggcagtatttgtagaggaacaaggctgtcccatttcggatgaattcgatgagttcgatacactccacggtgactgccagcacatcctggcttatcatcagaatgtacctgttggcactgcacgtgtccgtatcgttggccacacggggaaactggaacgaatctgcattctgaagtcttaccgcaaattcggtttgggaaaagtgatcgtcgatgcattagaacgtattgtaaaagaacaaggcatttctgccttcaaactgcacggccagacacaggcggcaggcttttatgaaaagctcggctatcggactgcatcagaagaatttatgctggacggcattccgcatgtgctgatgacaaaacaagacgattctgcgctatagattgttcacaaatttgtcacttatgagcatgaacggttcattggtatactaatcaccgattatggagagaaggaatgattgtatgccagcaaataaaaaagaaggccttatatttggcgtgatgatgtgctttggaatggtttgcgtcatgtcgatttacaatgccatcatcaaccgagccatctacgatttttcactgatgaccgtttttgaaatggtcatcggttttatgatcgccctcctgttagatttactgttagtgggccccctcgccaagaagattgcattccgcatgccgttcgacaagactaaaaaaatttatgtcatccttgccatgtcaacttgtatggtgattggcatggtactttgtatgtctgtgttcggtttagtgacagcggttctagcaaatgggctgaacggggacagcctcttcagtgcttatcttatgattgtgttgaaaaatttcatcctggcctatccgttgcaattactgattatgggcccattagtcagaggagttttcatgaaatttgtaaaaccaaagctcacagccgcaatttaaatagaaaaggagtgagcctgacactcactccttttgctcatgaatcgaatgtaaaacaagctccgcaaaagcctctgcggcaggcagctgccattttttctttttgggtgtgagtaaatcggatcgagggcttcaccatgctggagatttttcagcttatgtttttcacttccattaatccctataccttaccacatagtttttatacaattcttcgttataaaggatttcttcgccatgtgaagagcaaatgagcgttggtttgatttgatctatgattgagccgctgtcgatgttctcatttatatcaacactgaatcttcttataggtgggtgtaaatcctccttacttgtgataaaaaggtcgcccgtcaatagcgtacgatcgattttatgataatacacaacatgccccggcgaatggccaggtgttaaatagtatttcagaggcagatgagcaagcgtttgctccgtcagcggctgtacaatatgggctacccctgtgttctccacttcatttttgttcggatatggctcttccccattgatgtactttagttctttctggtgcgcaaaaatcggaatatcaaatctctctaaccattttgatgcacccccgatatgatcactgtggccatgggtaagcaaaatggcttttggattgccgatcgctaacgctgccctaatttgagcatcagcaaaacgttctattcccgtatcaacaatataaacatcatcaccatctttgataaaccaggtatgaaccggaatacgaagaggcacatcaagctcaaattcacattgaaagacatgttctgatagttgtctcaaattcacgcaaaccatctcctgtggaaattttttgatagttttaaagaaaacagaagtgaacggactattttcacccacgctcgagctgactggattcttgagaggaaacgccgattttcgccagcatcagctcaacttgttaacgttgtccattaataatcccttttgttccccttcttcacatattcccaatcacgttctatattcttcctcactctatgaaggagtgcagaaatggtttccttttcctctgaagtaaaaccggacaaggccacttccgtggaatgttctccttctcttcttaacaatggatatacctttttccctttctcagtcgggaacagtttttttatttttttattttgctcatccggcagtttttgaataaatccctgcatttccagcttcttaatggcccgcgcggccgttgtccggtccacttttatcatttccgccaatttttcttgaataattcccggattttcgtatatacgcacgagatagagatactgccctcttgttaagtctaaatctttaaattcgatgttgcttatggaatccaacgctcttgctatcatgccgatctcacgcaaaatatcattcattcctaaaacccctcacgtatttttgttgcaattacaacaaaaatgttttaaccttactattataagaccacatgcgtgctgtacagtccagactaatatcagaaaaggattgattcataatgaatataaaaagaataacaactgaagctgatttacatgaagctttaaagattagaagaggcgttttcattgaggagcaacatgtgtctgaagccgatgagttcgatgaatttgatacgcttcaggaacaatgccagcatatcttggtatatcatgagaatcagcctgtcggcaccggacgcgcgcgcatcgttggccatacagcaaagctggaaagaatctgcatcctaaaaccttaccgtaagtacggattggggaagatcatcgtaagcgggttagaggaaatcatgaaagaaaaaggactgacttcatataagctgcatggtcaaacacaagcggcaggcttttatcaaaaactgggctaccagatttcttcacaggaatttatggaggacggcatccctcacgtcttgatgacaaaagaaatatcgcggaatataacatgaaatatatgtattacggaataggcatactcatattaagtttgggcatttccttaaccatacaatcaggactgggcacatcacccttcgatgcccttttggttggtctgtcaaaaaaaatcggtcttaccgtaggaagctgggaggtccttatttctgtgatcctcttaatctgcaacgctatattaacgagaaaaaaacctattttgctgggcttgattacagcattcattactggaataggcattgacctatggttgtttgttgtaaaaaacaccatctatctaaactcgttgttaagcaaactgatttgttttggaattggtttggtgctcatcggtcttggaacagccatctatcttcagacgaaattcgcatcaacaccgatcgatcatttaacacttattatccgagatctctccaaaagaacaatattgttttcaaggacattggtatacgctcttttcttagtattagccatcatctttaaaggccctatcggcatcggaactcttttaacggtttgtttgggaggaatgctccttcacgtttttatgcctattgtggaaagacatttcttatcaaagaatagaagaggttattaagaaacctcttctcgatccaaaaaacgaaacgcaaaacaagccccgtttcgttgtcaattctttatctctggtactgttgaggttttataatcaattaaaatttatagtaccaaaaaatcgcaatttcatttgctgttggaaagttggaataaagcatcgtatcaaccgcacctattataaagtgatgtttggcataaaaatgacaagctgaaatattaatatcttgggtttcaagcataagaccacaaaaatgattctcctttgcccactcaatcgctttatgtaataatgctgttccaacacctttttttctatagtcttttgccacggcaatgtcctctattagtgcatacccattccagttagaacggatcttaatccggccaatgcagttgttttcaagataatataaaaaagccgctttcccctcttcttcaacataactaacatccatgtcatcatcttcatattgtttaaaataaggtttagaaaatcgttcctcagtatatgtccaaacaccgttttcaaaagcaggtatcattctcccaaaaacaacgaaaggttcgtttggtttattgaaatctttcatattcaaatgagtcattttcatgatcatatcaatctccgccaatcgagataatatttagtaaactcgtttcgatactattcaacaacagcttccaaaagtgtactctttaagagaacagcattagataaggcatccattaccttatatatttcactatcttaatgaggtatttcaacagaggcttgtggtacagtaaaaaggaatagaaacaagagaaaagaagatgaacctatgcccactaacaataaactcaatgagaaatatcatacttccttcaactcgcccacaaccctgttgactagtatccgtggagagaggaagctttgacacagcttctgccattgatgacatctctattgaagtatccaaaggacaaccaaggatcgctctttgactttttcaagaagaaagtagagtgaataaaggagtgattgagtatgttaacaagagaagatatctttaaacacgtcaaagaaaaatacggtacatcgcctgattacccgtgggagaaatacccaaactatgcttctttgagacatacatcaaacaaaaaatggtacggtcttatcatgaatgttctcccagaaaaattaggcttggatggtcatggcgaaatagatattctaaatctaaaatgtccccctgaaataagtgatcgcttaagaaacggggaaaatatcttacccggatatcatatggataaggaacattggatttcaattgttttagaacggacagatccagaaggcgaaatctataacttaatcgagcagagctttcatttaaccaagtgaagataaagagtgttcctgctaatcaagctgcgaagagtagtgggcactttcattttaggatactgttcttcactctgtccacaaacgcaacttagttcatctggtgcgagagtgggagaagaatttcaaccaacttcttatgtaaaaggatgaatagttatgacaaataacttaaaacagagaagaatcattttagatttagcagttactttagatggttttattgaagggaaaaatggagaagttgattggtgtattatggaccctgatatggggtttactgattttttaaatcaaattgatactattttatatggtagaaaaagcttcgatttatggggacaatacattccaaaaaatgaagaccctgatacagaaaaggaactttggaaattggttcatagtaaaaagaaatatgttttttccagaacacaaaatgagattgataatcaagccatatttataaatgataatattcttgaagaagtaaataaattgaagaaaaatcctggtaaagacatctggctatatggtggagcgagtctcattacaacttttataaatttggggcttgttgatgaatttagattatctattcaccctgttgttttgggagaaggaaaaccgttgtttattgatgtaaaacagaggataaatttaaaaatggtgaatacaagaacattttcctctggcgttgtgcaaatcgtttatcattggaatggctaacattgtaaagtaacactcgacagtaatccttcttattgaactaaaggggaatccataaataatgggttccccttaatatactatggaattatcaatatcaaattttctgtaataaaagaggattgaaaaggacgatgtctcctcaattaacatcattaagcattatagtatattttcttctccctcttttaagtaatcggctaagttttgtatttataaaaaaacgaaagaaggtgatccaatgcctactaacaataaacccaatagattaatcgctgagaaatctacttattttacttcaacatgctcataaccctgtggactggttcccttggggagaagaagcatatgaaaaagcgaaacgcgaaaacaagcctgttctcgtatctattgggtatagctaacgatggctaatctaaagaacatgctattgatgccatgtttattcattttacaaaaaaggatcaaccttgaattactttcacaagattgatcctttcactcatttagccatgtctccgcgaacgtttatatacattcaagattactagccaacaaataacaatgattcctgcaaaaagtatgagcatattgctatacaaataggtagagtgatcaacgtcaataggcagcagcctatgatctaggaagccgatagataataaaccgcctacaatcgcaatacccgttccctctgataaaaagctcgtgaaattaagcaaactcattccagcgcccgcttccttttctttcaaactgctagacacaactgtagatataactgtttttgtgaaagatagccccccaaaaacaaaaattactataattgtcatgatccatggtgctgcatctataaaaaaggcagcgattaaaaagccggaagaaagcaatgcacttccaatagttagtacatacaaggaacctttccgatcaacaagcaatcccccaatgtaaccaaagatgatgacactcattgttccggggaaaataatgccgcttccaattgctgcagtacttaaatggtgaacatctttcatcatgtaaggaaccatagagacaaatcctgctactgtaccaaatattagtcctccgcaaagggttccaatcacaaaaaagacgtttttccctaattcagggtcaacaaaagggtcctgagctttcctaatgtgttgcacaaatatgaagaaagcaaggatactgatgatcagaaaagaaaatctataagatgttgtaaacagcataaaaaatacgatacctgcagacatcaatataatccctgccatatcaatgtgtcctcttattctctcttcctttttcaacaattttataaggaatggaacggtgataattgttgcagttggaataagcagcaaatacgaccaatggatataatgagcaaccattccgccaatagctggcccaacaccttctcccattgctaccagggacccgatcaggccaaatgctttccccctgttctcttttggaatatagcgcgcaacgacaaccatcacaagagctgggaatgcggctgcaccaattccttgaataaatcgggctagaatgagaataggaaagaaagagtgtccaacaaatccaatgatcgaccctaagccatttaccataatcccaaatagaagcagatttttgatgcccagctggtctgatagctttccatatagagctgttccaatggagaaggttaacataaaggctgtattcacccagtttgcacttgctggcagtttattaaactcgttggcaatatcaggtaatgagacgttcagaaccatttcatttaatacgctgaaaaatgatagaacacaaagccaaatcaaaacttgattgtgccgtaaagttgactgtgaataagacgtattcacaatttcccctccattaatgagggcagacgcagtttatagggtcattgatacgcttccctcttttaattgtaccctgttcattttattgcacttcataataactccccctacatttgattgatatgatcttattatatatagactaaggattaaacttttactttttttataaaaatttgaccagattgcgaaacaaggaaaaacgttattcgcatttatctcaagtggcaaaatgaaacattagtttatattttcacatcacaattatcgataagcagtcagttattgtatttgtttaggataactgtggtaacctgaatataaccaacttaggaagaaggtgatcccatgccaaataaaagtaaacccaatagattaatcgctgaaaagtctccttatttactccaacacgcccacaaccctgtggactggttcccgtggggagaagaagcatttgcaaaagcaaaacgcgaaaacaagccggttctggtcagcatcggttattcgacgacttgtcattggtggcctgggataatcaaatcgtgtggaactccattaaaagataacagaagccattttaaacgataatactatttgttcaaacaatacagtctaccttttatttcattcattttctaaaacctgtaatccgtaaccacgcggtagcaggtttttttatttgcttgacttagagttaactctaaattgtaaactaactttaattaaatgagagggatgatgttgttgtattccattagtaaagctgctgagaagactagtattagttcgtatacattaagatattacgaaaagattgggttacttccaccaccaaaacgaaaaaacagtggaaggcgtttttatacggagactgatattcagttcatgttattcctgaaaagtttaaaggaaacaggtatgtctttggaggatattaatgagtttgtcaaagacggatgcattttggaaaaaatcaattcggatgttaaatcggcacaactctccccatctataaataaacgtattgagattttaaccaagcacttagagaaaatggaaattaaaaaaagggagctggaagaagtgatttctactacaaaaggaaaactggatacatattattcaattttgaaagaggaagtggaaaacaaatgaaacatttaaatatatacataatgttacttggcttctctattttcacgggagctacttttaatcttgcaaaatatacagttggatatttttctccatcgtcttctgcggcatggcgtttcggtttagcggctgcagtgatgctcatcattttgatttttactgaaggtataaagaagagtcaattacggaaaaacgccgtttcatacattgttcttggaattataggaatctttggatttaatgccttgttttttgttggtttaaaatatacatctcccgttaacggagcattaataatggggctgaatcctttattaacagcaattctcgctcgaattatcttaaaggacaacatgacaaaaaaacaagtactcggcatattctttgcattcatcggtgtattgttagtcattacacaaggttctatcgaaaccattaaaaccttatcaatttcaggaggagacttaataatctttacaggtaacgtttgttgggcactttatggcgtacttggacgtcggtttgtaaaggatggtacaccgctatctacaaccacttatacgatggttattggtgctgttagtttaatagtagtttccttatttacatccaaacctgtttctttatcgaacatcccgattggagtttggggggcaattgcttttatggctttttttacaagtgttttgggttacctatggtggaatcaggggattaaagagattggagctagtaaaacatctttatttttcaaccttgttcccgttgtaacgatgattatttcatttgccgttggaacaccaataaaggtatttcaagttattggggctgtgctagttatattaggcgttttaaccgcttcgggggtaatacgtattcctaagtacaatactaaagaacagtcagctatataaagaaatagggagtatttttgagaaaatgtgttaagttaaatatacactaattataggaagaaggtgatcccatgccaaacaaaagtaaacccaatagattaatcaatgagaaatcaccatatttactccaacacgcccacaaccctgtggactggttcccgtggggagaagaagcttttgaaaaagcaaaacgcgaaaacaagccggttctggtcagcatcggttattcgacttgtcattggtgccacgtgatggcccacgaaagctttgaagacgaagaaatcgcgcgtcttctcaatgaacggtttgtggcgattaaagtcgaccgggaagagcggcctgatgtggattctgtttatatgagaatctgccagctgatgaccgggcagggcggctggccgctgaatgtgtttatcacgcctgatcaaaagccgttttacgcgggtacatattttccaaagacgagcaaattcaatcgtcccggttttgttgatgtgcttgagcatctgtctgagacgtttgcgaacgaccgcgagcatgtcgaggatattgcggagaacgccgctaaacatttgcagaccaaaacagctgcaaaaactggtgagggccttagcgaatcagcgattcaccggacattccagcagcttgccagcgggtttgacacgatctacggcggtttcgggcaggcaccgaaatttccaatgcctcatatgctgatgtatttgctacgttatgatcacaatacagggcaggagaacgctctatacaacgtgacgaaaacattggacagcatggcgaatggcggcatttacgatcatatcggctatgggttcgcccgctattcgaccgatgacgagtggctcgttccccactttgaaaaaatgctgtacgacaatgcgctgctgctgaccgcttatacagaagcctatcaggtcacgcaaaacagccgctataaagagatttgtgagcagatcattacgttcattcagagggaaatgactcatgaagacggaagctttttctcggctttggacgcggacacagaaggagaagaaggaaagtactacgtgtggtcaaaggaagagattctaaaaacgctcggggacgatctcggaacgctgtattgccaagtgtatgacatcactgaagaaggaaactttgaaggcaaaaatattcctaacctcattcacacaaagcgagaacaaatcaaagaggatgccgggttaaccgaaaaagagctcagtctcaaactcgaagacgcaagacagcagctcttgaagacacgcgaggaaagaacctatccgcatgtcgatgataaagtgcttacctcatggaacgcgctgatgatcgcgggtcttgcgaaagcggcaaaggtataccaggagccgaaatatctcagcctagcgaaagacgccatcacatttattgaaaacaaattaatcatcgacggccgtgtgatggtccgatatcgtgatggcgaagtgaaaaacaaaggctttatcgacgattacgcttttctcctatgggcttatctggatctctatgaagcttcgtttgatctttcttatttacaaaaagcgaagaaactgacagacgatatgatcagcttattttgggatgaggagcatggcggattctacttcaccggacacgatgcagaagccttaatcgtacgggaaaaagaagtgtacgacggcgccgtgccttcaggaaacagtgtggcagctgttcagctgctgcgtctcgggcaagtcacaggcgacttatcactgatcgaaaaagcggaaacaatgttttccgtgttcaagccagacatagaagcgtatccgagcggccatgctttctttatgcaaagtgtgttaaggcatctgatgcctaaaaaagaaatcgtgatttttggcagcgcagacgatccagccagaaaacaaattatagcggagcttcaaaaagcctttaagcccaacgactccattctggtggcagagcagcccgagcaatgcaaagacattgcgccatttgcagcagactaccgcatcatagacggcaaaacaaccgtttatatttgtgaaaacttcgcctgccagcaaccgacaacaaatattgaagaagcgatccacacattaataagcagcagggattaagacccttgctgcttactttttgatttcttatggtaccataaagcgatccccgcaaacacaaggttgaccgctatcgtaaagaaagcctcccacatcgggttcccccgcgtaacggtaaacagagaaggaattcctccatacacactgtttttttctgtaataaacatacacaaaaacatattattcgcggcatgggcgccaagtgatatttcgatgctcccagttttaatcgtgtaatacgtccacacaaacccaaatgttaagtactcaattcctgcccagacagcgccattgttcatttctggattcgcaaaatgcaatacgccaaacaatcctccgacaatcagtgtcaaaaatagaggatttttcgtcaatctcccgaaagcttgaagcaaaaatcccctgaaaaatagttcctcagctgatgtctgaatcggaaccaaaatgagggcagccgctagcagccagataaatcgtgatgcattaaactcttgcattgaatagctatcaggatgaatcacaaaatcaatcaattgtacggcgatcattagcaagaaataagcaataaaaccaaaggaaattctccgccaattcatctttgaatttggtgttatcaccgttcggaaaggccgcttcaaaataaagcgcacagccagccaaactcccggaatggcgaataaataaatcacatgggacaaataaagatctacgaggggatcactcagcacagcttcatccaaatcaaacgtgatattgggattcacaataaccgtgaacaatatagcgaaaaggtaagctatattccctaatacatataaccctaccatcaccaaaaaagcgaaaaaatatctccacaacgtattgtttccttctataggacggataaatgaattcattccttctatgtctcttcctttcaatgagaatattactatatatttgcataaattggtctatgaatctactgttttggaaatcttttaagcaaaattaaaatataaagtgtgaatttagttcttccatctagtgatttgaactctgttgccaatgaaccaagatacttataatagtcccaagaggggaattttcagtcttttctactactcaaaagggggttttttatgaatacgatcttcaaacaaaagaatacacatcctttctcaaacgcagcgaatcgtttagaccgccttccgatttcacgcgttcatttccaagtgttaaccgctctcggcattgtttatttctttgatctcgcagatttatttaccctcagcaacgtagcgccggcactgatcgagcattggggcatcccgctttcaactattgctaacgtaacggccgcttcgtttttaggcatgtttttaggcgcttcactgggcggacggctgtccgatcgaatcggccgcaaaaaagccttaaatctatttgtctttgttttctcaatcgcatcgctatgcaatgctgcggcatgggacattccatctttaatgacattccgtttcctcaccggatttggcgttgcagaagccatggtcattacgaatagctatttggcggaatttttcccttcaagtgtacgtggaaaatatatttctttttgtgccatgattggattgattggggttccgatcaccaacattgtgtctgcctttgtcattcctcttggttcatggggatggaggctagtatttgtatggggtgccgtcggccttatttattttttcttcatccaccgtctggaagagtcacctcgctggcacgaaaatcgcggggaatatgcgaaagccgatgcgatcctcacccgaattgaagaacaggttgaaaaggagaaaggcccgcttccggcagcatcccagcctaaagtaagcgaaactgttaagcagaatgcaggttacgcaggcttattgaaaggcagaaacctcaaaattaccatcgtattatctgctgtatggatttttgaaacgtttgggttttacggatttgcttcatgggttccaagcctgctaaaaagcaatggcgtaaccatggaaaatacattatggtataacgtattgcattccgtcggcgctccacttggcgcactgctcggctccatgatttccgaaagatttcaaagaaaatggattttagctgcgagtgcgtttctgacggccatcgccgggctcttatatggtatgacttttattcccatcatgatcattgtatttggttttatcgtgaatatcacagaacgggtctttacctcgaacttatacgcctatacatctgaaccttatccgactgaataccgctcgtctggcagcggtttagcctatggtcttggccgtttttcaaacatttttggctcattgcttgtcggatttattgccgttcagctcggctatatcagcgtcttcttatttattgggggctgttggctcgcatgctccttgctgttaatcttcttcggtcctaatacgaatgcaaaacagatttaaaaaagtcagtgcggatctgccgcactgatctcattacaattgcttcaaaatccttgcggggtttccgcctacaacagtattagcgggtacatccttagtgacaacagatccagaagcaatcactgcgttatcaccgattgtcactcccgggttaatcaccgcccggcctccaatccaaacttgatctccaattgtcacaggcttaccgaactccttcccggatttcctttcgatcggatcaagaggatgaccggccgtgtagatatgtacacctggcgcaatcaaacaatgacagccgatacgcacctcacacacatctaaaatgacacagtcaaaattaacaaatgtatgatctccgatatgaatgtgatagccataatcacagcggaatgtcggcaaaatcgtgacttgatccccaaccgaaccgagcagctccttcaaaagcttcgtccgcactgcatcatcttccggtgtttcgttgtattgtctaatcagctgtctcgcatgcttgcgttctagtaatagttgttgatcttccgaattgtataattctccggctgccattttttctttttctgtcctcagcatttaagtcactccagatgtcagattgtaatctcgatcaaatttccttcatcatcctcaatcacgctttcatagtagccgtctcctgttgtcctcgggccgtttactactgcgaaaccatccgccttcaatcgatcagtcagttcgtcaactttctcccggctcccaacggaaaaggcaatatgtgcccagcctgtcattgtttgtgagggcggatcggtcacattcccttttttcataatttccagccttgctccggaatcaaacgtaataaaataagacttaaaatcttttttctcattatgatacaaatcattcgcttcgccattaaaatacgattcataaaaagacttcattcgctctaaatcattgacccagaccgctgtatgttcaatctgcatttcttcctcctccttcgccttcaatgaagttataaggtatgaaatgcatttcagttcaagcttttttcttaaatttatgctgaattttgatatcagcgggttcatcctgcaaaaatagagaaaatgctgcgatgccgagctgctcaagattcaaatcaagcgacggaaaaccaagaacacggctgatagaagtatttccctcgcctatgatttcaacatcccaattattctttttggcaaatagatgaattccagctgccacttcatcactatttgcataaatagcagtcggaacccgcccgctcatataaaaatgttcagctgccagctcaccatcattcatatcgttgcatccggacagcatatggcggtcttccaaccttccgcagacagctttataggccgcagctttatcagccgtgctcgggctcctatcagcttctctgacacacgtaaaagcaatattctcatgcccgcggctctttaaatagcgaaagctctctgcataagcagtttttctgtcattaaaagcacaagggacatcaatgtctccggtatcctcacaagcgatgaccggcccatattcctgataagctaaaatgctgtcccaatgattggcgcgggaagtaatgatgagaccgtctattttcttcgttcttaacagctctaaatatttgatttcaatatcggggttataattggtggggagaagggtcgttgcatactcatgctgaaaagccgccttggtgattccgttaacgattttatcaaagcagggatgatcgctataaggcagaatcacaccgaccgtatgggttttcccgcgaatgagatcgattgcggttcgatttggtgtataatccaattccttcatgacttgatgaacaagctttctcttttcttcagatacatacggatgatgattcaatacacgcgagacagtcgaaacagatacatttgccagtcttgcgatctcttttatatttgccatctctttctccttttcatataaaaaaagcagtaagtgtaaaatccttactgctatctcatcatatattgatgataagttcaacaggacaatggtcggaacccatgacgtccgctgatatgctggcatcttcaatctgttccttaaggctttcagaaacaacaaaataatcaatccgccatccaatatttctgtcccgggcgccggcacgatacgaccaccaggaataagcgccttcaagatcaggataaacatgacgaaaagaatcaacaaagccagcttctaagaaacgagtgaatgcctctctttcttgatctgaaaatccagcgttattccggttcgcctttggatttttcaagtcaatctcctgatgggctacattcaaatcaccgcataaaatcactggttttttctgatccaattcaagaatataagacagtaaagcctcttcccattgcatgcggtaatcaatccgctctaatccccttctggaattgggcgtgtaaacagtcatcacaaacacgttttcaaattccagcgtaatcactctgccttcttggtcatgctcttctactccgataccgtagatgacctgcagcggttcttgcttagaaaaaacagctgtgccggaatatccttttttcactgcataattccagtacacatgatagtcttcaggctggagatcaacctggccgtcctgtatcttcgtttcctgaagacatataatatctgcatcctcttctttcaaataagagaggaaatccatttttctcatcacagcccgcaggccgtttacattccatgaaatcaacttcatgtttcatcctcccccctataaaaaagagcaagaacccgaaggtccttgctctttacatatcagcttactcaccgcttacgtatggaagtaaagccatttgacgtgcgcgtttgatcgctgcagtcaatttacgttggtatttagcgtttgttccagttacacgacgtggtaaaattttaccgcgctcagaaacaaactttttaagaagatctacatctttgtagtcgatgtgcgtgataccgttagaagtgaaataacacactttacggcgtttcgcacgaccgcctctgcgtcctcctgccattgtcatttccctcctttctttttcattttaggcgataatcacattagaatggaagatcatcatccgagatgtcaatcggtttgccgtcgttggcaaatgggtcatcattaaagctgttcccctgattgcgtctctggttgttttgatttcccccaaatggattatcattttggcctccgccaaagtactggcctccgccgctgtttccttcgttgtatccacctgaaccagaaccgccgccgtttttcggctcaagaaattgaacactttcagcttggacctctgtcacgaagacacgctgtccttgctggttttcatagtttcttgtttgtaaacggccatctacgcctgcaaggcttccttttttcaagaagtttgcaacgttttcggcttgtcttctccaagtgacacaattaatgaaatcggcctcacgttctccggactggttcgtaaatgtacgattcacagcaagagtaaacgtagcaacagccgcaccgtttggcgtataacgaagctctgggtcttttgtcagtcttccgactaatacaactcggttaagcataagaaagaccaccttttaccattatatatttcaaaattgcttattcttcttctttaacaacaatgtggcgaatgatatcgtcactgatcttagctagacggtcaaattcttgaactgccgcagcgtcagattgaacgtttacgatttggtagaaaccgtcgcggaaatcgttgatttcgtaagcaagacgacgtttaccccaatcctttgttccagtgatctccgcaccgttagaagtcagaacgttgttgaaacgctcgataactgcttttttagactcttcgtcaatgtttgggcggataatgtacataacttcgtactttctcatctgtttgcacctccttttggactaagcggcccataatgggcaaggagcaataattctattactcacaattttatattataccaaagctcttgtccctttacaactgcatcctatacattaaatcggaaatgaataacatctccgtcttggaccacatattctttcccttcaaggcggacttttcctgcctctttagctcctgccataccgccgcccgcaagaagatcctcataagcaactgtctcagcacgaatgaagccccgctcaaagtcactatgaataattcctgcacactcaggggctttcatgccttttttgaatgtccaagctctgacttcctgttctccggctgtgaaatatgttgcgaggccgagaagagagtaagacgctttgatcagctgatcaagacctgattcttgaatgcccagctcttccaagaacatttgcttttcttcgccttcaagctcagcgatttcagattcgatttttgcacacacaacgataacttctgcgttttcgccggcagcgtactcgcgaatcttcgctacattttcattgccagatggatcagcaacttcatcttcacttacgttggccacgtacaaaataggcttcgaagtcagtaaatggagctgcttcacaagcttttgctgctcttcagtgaattctacagatcgagcaggcttttcactctcaaacgcttctttcagtttagataaaatctcaaactcaaatacagcgtctttatctttttgcttcgcaagcttgctgacgcgtgtaatccgcttttcaactgtttccatatcagcgaggatcagctcaaggttgatcgtttcaatgtcatcaatcggatcaacctttccggaaacgtgtgtaatgttgtcatcggaaaaagcacggacaacgtggcaaatcgcgtcaacttggcgaatatgagataggaacttgttgccgagtccttctcctttagatgcgccctttacaatccctgcaatatcagtgaattcaaaagcagtcggcacagtcttcttcgggttgaccagctcagtcagcttttgcagacgatcatccggcacctctacaattcccacgttcggatcaattgtacagaacgggtagttggctgattcggcaccggcctgtgtaattgcgttaaatagtgttgattttccgacgttcggcaaaccaacaattccagctgttaaagccattctttcatctcctctatataaaaccgtcattgtatgaacgtattttgaacctagagcaattataaggaggttcactggaaaagacaagctgacaaaaaagcattttcagcttgccaatccctttgattatgcttttttcaagcctactaaacagtcaaaaagcgtacttcccattccattatcagaatttgtatcatttgtcagtgcattgactgaccctccaaaagccgcccacatgccttcatctatattaatcgtcttcgcatgagcctgcttcatcactttcaccttgcccttcatgcttccgcggtcattaaagatgacaacttcgtctccatcctgaagatcctgcccagccgctatatctggagaaatatcgacctgaacgtgctgaagcttttcaataaacggcacatgctgtgaatgattggaacgctgcggatgaatggataagagcgtataagggtactttccagctaactcctcattatggaaaacagattcttcgggcacatttaattgaagcgagccgctaaatcctttttgctcagctagcgacgaagtaaattcaaattttccactcggcgtcaaaaactgataatcatcccacggcacctgttttactggaagagggaggtggcctttttcttttaaacgctcaagtgtcacatcctctgcttccaatgaagaaagccccatctctaaaaattcttgagtgctgtattcaaacagctcgccaaacccaagacgttttgcaagctctgaccagatccagctgtccgatttcgcttcaccctgcggctccacaagcttcttcccgtactgaacataatgatgatacatactggaatagtagatatcttcttcttcaaaaacagtggcagtcggcaaaacataatcacacagctctgcggtatccgtcataatggaatcaatcgcgaccgtcattggaaccttttcaaatgcttgtctcaccttatttgtattcggcacctgagtcagcggatttccgcacgtcacaataatcatctcaatcgcaggatcagcagcggtcaacacttcttcagcctgtgtcatcattgaaaaagaacgggatgttgtttttaattccggcagcgtcagctttgtttttgcaaagctctcaccaatctggacatttccgaaattcgcgccgccgcccttaattccgacatttccgcttgccgccacaagtgcatcaatccaacgaatcgttcccccgccgtttttatatcgctgcatgccaagccccataaaagtagacaccggaccatcagcatacaaacctgccaaatactccagctcctccatagaagtttctgttttcacaataaactcttccagagaaacggtcttcaaaagctctttcacatcatcaaaaccgacagaatgctcagaaataaacgtttcatccgttcttcccatctcaatcagaaccttcaaaacggctgccgcaagccagccgtccattccaggctttacagagatatagcggtcggcaagcttagcagtcgggttgaagatcggatcaatcaccgtaatcgtggcgcccttctttttcacctgctgcaagtgatggtataagtgcatatttgttcttgatacatttcttccccacacaacaacatgcttgctgttgtaaatatcaagcggtccgtgaccgtacgaacggccaaaatcccagctttgcgcctcgataccggagccccagcatatgcttccgacgatttcggtcacgccgccatatccattaaaaaaacgctgatcaagcgcttttaacagaccgttattcgcataatcatggctgtgcaaaacagcagtcgtctccgacgtttccttgatttcccgaagtttatcggcaatttcatcaagtgcctgctcccaagaaatccgcacaaactcgccattttgttttttcattggatagcgaagccgatcaggcgaatttgtttttgtctcaagcattctgccgcggccgcagattttaccttccgtaatcggatggtttggatctccgtccacttttgttacctttccatcatcaacagtcaccaaaaagccgcagctgtcccaacaattcagcggacatgccgactgatgcactttgctcatcgccgtcttctccttaccttctatatgaaaaagcatgagtgtcggcctatttatgaagtaggctcctcatgcttgactagtactttttttagttttctttcaaattctcttctcggaatcataacactgtgagagcatccctcacacttaattcgaatatccattcccatgcgtataattttccagctgttcgctccgcatggatgcggttttttcatttctacgatatcattcaggccaaagtctttatccgccaagacccttcacctcttttcctaaactgctgtatctattgtacaaaaaaactgatcataagagcaatcaagatacccgaaaagaaatacatcctcttatttccatttactcaaaataggatataagagcagacaaactaacaaatacaaattgagcatcccatatatcggatacaagaacgcgatcaaatcagaaaatccgaaagaagtaaaaggtaccattaacactaacaaaatcaacacaatcatccatctcggcatatgaataaacgccatcagccggctggacaaacccagcaaaccagctaccgtcgtcgtgtaaatcgccaggcacagcaccgccgtcatacataaaaaaaggaaataaggcgcaccctccagaacggcaaacagcggtatttcaaactgagaaagggagcccgccagctccaccaacgtttcattataaacaaatgagatcacgccaaaaataagaccgcttgccacacttgcgatttttgcttctccgagccctttcatctctttcccaacagaggataaaatcgcaacaactgaaaggatgtttaaagaggtaaacgtaatgctcgcaggccagttatactgctgggacaaatcaatcgtccacgtatggtgatgtgtgctctgaaaggagatcagcgcatataaaagccccgctactaacacaggaatcaaaatactatttatagataatattcctttcacatcccacaaaaacaagcacactgtcacgatgcaaatcagcgtgattccccaccagaaaggaagcttgtacatttgcagggtcacaccgcctccggcaatcatcaccatagtcgtcgaaaacaaataaaaaatgatgaggacatcataaattttcgccagccatggccccattaaatgctccagaaccggcagaaaatgagtggattgaaccttaaaactgattttcatcacaatataagacgagaaaatgaacataattgtaaacagcacaatagcaagtccgctttccgccccaaaaaactgccatatctcctgaccgctcgcatatccggccccgatcaggctccctaatatgagcagcatccacttcattccggctctccacaacactatcacctcatagacaaagttcagcttgttcccgttattgttactatataaataaaggaaagcaaacatgccatattttcatagacatttgaacacaagctgaaattatcatacgaaatacacataaaaaagactgctaatacggcagtctaaaaagagatatttatttgtttgtccgcggaatgaagaagtgaacttcactcttcacttttttctaaccattcctacctattcaagtgtttcataagcagaccattgcttgatcatgatcgaggcaatgggggacaatacttgtaatcgcccactaaccattcatatcatgccctctacttttttaaaatctctggtgccatacacaaagcataaaaaatcatactgctggatatactgtaaacaaccttacataactacacacaccatagcaattctgttacctactataacaaggaagtgaaacccatgaatcgaaaaggcgggcttttttcttctcaggaacgagtaaagcaatatgtttcacatacagatgctgcagcggcaaaacaaatccaaaccatcctttcttcatccttacgtaaagctgctggcaaaccaattgtcgtggtttgtatcggaacagaccgttcaaccggtgactcattaggcccgctcgtaggaatgaaactcaaacagatgcagctcaccagattccatgtctacggaaccttatctgaccccgtccatgctgtgaacatgaaggataaaatcaatgacattcataaattacataaaaacccatttgttatagcagtcgatgcatgcttaggccgcgttaagagtgtgggttcatttcaaatcggggacgggccattaaagcccggagccggtgtacaaaaagaccttcctgaagtgggagatcttcatattaacggaatcgtgaatgtgagcggttttatggaatattttgtattgcaaaatactagactcaacttggtcatgaatatggcaaatgttctagcggaaggtttgagtttaacagatcggacagagtggaggcaagaacgccttaacccgttgcaaaggctcactgggcgcatataaaataaaaaccatcttcgtttgaaagatggttttttcatttatgattctcgttcagacaaaagctctaaaatccggtcaaggtcttcattagagaaaaattcaatttcgattttgccttttttcttctgtcttttaatattaactgttgttccaaaataattttggagataggattcccgttcttttagaaccgcatctttcacaggttcttttttctttgtttcacgtggaacattctgattcaactgctgaatcagctgctcaagttggcgaacattgagctgctccgcaatcactttttgtaccagcggttcaagcttatttttgttttttaagccaagaagcgtgcgtccatgtcccatagaaagcgtgccttcggcaataagctgttgaatattttctggcagtgtcagcagtcttaaatgattcgcaatatgcggtctgcttttcccaagacgtttggcaagctgctcttgtgtgagatctaagtgtttcaaaagggagtcatatgcctgagcctcttcaagcggagataaatcttcacgctgaaggttttctaataaagcaatttccctcattaacgcctctgataattcacggacaatggccggaactgtatctaaacctgccagctttgccgctcgaaaacgccgttcacccgcaacaatatcatagccttttaaagattttctgacgataagcggctgaagaatgccatgctgcagcacagattcttttagttcagctaatgcctcgtcatcaaagtgttttcttggctgataaggattagggcgtaaatcggcaattttaatttcttcaactgtctcttcagacaaatctacctgattaaataacgcattaatcccttttccaaggcctttagccattcgcagccacttcctttgctaaatctaaatatacttccgcacctcttgaccgcggatcgtataaaatgatgggttttccgtgactcggtgcctcactcagacggacattacgcggaataactgtcttatatactttatccctaaaatactttttaacctcttcaatcacttgaatgccaaggtttgtccgggcatcaagcattgtcagcaatacaccttcaatcattaaatcagtattcaaatgcttttgcacaagacgtactgtatttaataactggctgagaccctccaaggcataatattcgcactgtacaggaatcacaacggaatccgaggcagtaagggcattaatcgtcagcaagcccaatgacggcggacaatcaatgataatataatcataattttgctttactgcttcaagcgctctcttcaatctcacttctcttgatattgtaggaaccagctcgatctcagcccctgcaagctgaatcgtcgcaggaatcacatccaagttctctactgtcgttgctttaataatatctattacatctgcatcatctactaaaatatcgtacacacactgctctacatcggctttttcaatccctaatccgcttgtcgcatttccctgcggatcaatatctaccagcagaacccttttccctatgtaagccaaacatgccccaaggttgacagacgtcgttgttttgccgaccccgcctttttggttcgtaattgctatgatttttcccacgatgtcacctactttcacatgaacatgtactatcttgcttctattctatcaaaaaaagattaaagcgtttcatttttttcatcattttgttccgaatcagaagggaaataattgaaaattcaagcacgctttatgctttctcttataaattctgcaatttctatgtttttttgacttaaaaaaggaatttcttaaagaaaaaaagaagaagtcacagtacagaacgtggaaacaggatggtgagaaaatggtttatcaaacgaagagagatgtacccgttacgctgatgattgtgtttctcatattactgatacaagcagatgccattgttccttttgtgctgggaaatatgagagtttccggctggatcatttttattctgctgactcttttaaatggactcatcatttggagctttattgacctaaaatatgtattgaaggaacaccatctgatcattaaagccggattgatcaaacatcaaattccttatgaaaacatcgataaagtcgttcaaaaaaagaaactatggtccggttttcgtctgatcggctctcgccatgccatcacaatatattatcaggggggatggggacatgcagtaatttcaccgcaaaaatctgaagaatttatccacaagctcaaagaaaagaattctaatataataatattcactaaaagtaagtgattaccttttgttaaaaatataaaaagctctcctgcttttcaggagagcttctattttggtatgcgaatcgttaattgaatatattcttcaaattcttcttcttccgtattcaattttacaccgctgtcttccaccattgatagtgactggcgaatcgtgttcatcgcaattcttgtatctctgctgaatgctttgcgtctcggctttggctttctctggccttgctccagcattttcaccacgcggtcttctgtctgctttacatttaaacttttctcaataatctctgtgagcagtgtgacttggagctcaggctgtttcagcggaatcagtgctctggcatggcgctcggtgattttcttctccataatcgcctcttggaccggctgaggcagctttaataaccgaagcttattcgcgattgtagactgcccttttcctaagcgctgtgcgagtgcctcctgtgttaaatcatgcagctcaagcagcctagcataagcatgcgcttcctcaatagaagacagttcttcccgctgcaagttttcgattaacgccacagaagcggtttccgtgtcggaaaaatccttaataattgccggaatcttttcccactcaagcgattgcaccgctctccagcgtctttcacctgcaatgagttcgtattggccttcttcttctgtatgcctaacaacaatcggctgaataatgccgtgtgtatgaatggtcattgctaactctttgattttttcatctgagaaaatggtgcgtggctgaaaacggttgggaacgatagcatttaccggtatttccagaatctcttctttgtttgtatcatgttcagcaatctccggctcctgttccttctcaccaagcccgaagaaacgagagaatgaatgcttcatgtacctacaccacctttaaaaactgccatttttataattctattttctcatggtttttcctgctgtacatccatcaattttgatgaaaatatgatggtattgtcatatcaggctgtctaaattacccttcaattggcgatttattaggagttcccggttttcttggatacttcttaggtgtattttttattttgcgtatcaccataatattacgatcgctttcttcaataggcagcttaaaagaatggatattctcaagttctcctccaagcgtcgtgattgcttttttgcctgcattcagttcttcttcagctgatgcggcttttaaagcaacaaataaaccgtttttcttcaccagaggcaagcaaagctcactcaaaacagataatctcgcaactgcgcgcgccgtcacaatatcatagctttcacgcacgtctttccgttgcccgaacgtttcagctctgtcatggcagaatgttgtattctccaattgcaaagcttcagacaacttttctaaaaacgtaatccgtttgtttagtgaatccacgattgtgacatggaggtgcggaaagcatatttttatcggcagacttggaaaacccgctcccgctccaacatcacaaatcgtgttcacctgattgaagtcgacataaaaagcagctgtaatggaatcataaaaatgctttaaatacacttcttttttctctgttattgaagtcagattgattttttcgttccattcaaccagcatgtcgtaatacagctcaaattgctccagctgacggggagaaagggagatccctttttccgccaaaccagaagtgaattcttcaatattcatgccgtcatcctttctactcggctatcttcgcaatgcgtccctgctctaaatacaccaatagaattgaaatgtccgccgggtttacaccggaaatgcgggaagcctgggcaacagacaaaggccgtacatttttcagtttttgacgcgcctcggtcgcaatccccttaattgcgtcataatcaattcggtctggaatttttttattttccatcttcttcagtttttccacttgctgaagagatttttcaatatatccttcatatttcacttggatttctacttgttctgccacgtcttgaggaaccggcacttctggcggcgccagttttgtgactgtttcatagttcatttcaggacgtttcatcaagtctgtgccgcgaactccatctttcaattcgcttccgccaagagaacggatatattcttgattttccggagacggcttgataattacagaatgaagacgttttttctccgcctcgatcgccgcttttttcttctcaaaagccgcatagcgctcatcagaaatcaatccaatgcgatgtccgatttctgtcagacgcaaatcagcattgtcatggcgaagcagcaatctgtattccgcacgtgatgtcaaaagacgatatggctcattggtaccttttgtcacaaggtcatcaatcagaacaccaatataggcgtcagaacggcttagaattacttcttcttttccaagcgcttttcgtcctgcattgattcccgccataatcccttgtcccgcagcttcttcataaccggatgttccgttaatttggcctgcagtataaaggtttgtgatttttttggtttcaagtgtcggccatagctgtgtcggtacgattgcatcatactcgatcgcatagccggctctcatcatttgcacgttttcaagtccaggaatcgttgcaagcattctttgctgtacgtcttctggaagacttgtagataaaccttggacatagacttcctgtgtatttctgccttccggctcaaggaagatttggtgacgcggtttatcattaaaacggacaactttgtcttcaatggatgggcagtatcttgggcccgtacctttgatcataccggaatacatcggtgaacggtgcaggttgctgtcaataatctcatgtgtctcagggcttgtatatgtcagccagcaagggagctgatctgtgatatattccactgtttcatatgagaaagcgcgaggcacatcgtcaccaggctgaatttccgttttgctgtaatcaatcgtgtcgcttttaacgcgaggcggcgtacctgttttaaaacgaacaaggtcaaaaccgagttcctccaaatgctcagaaagcttaatagaaggctgctggttattcgggccgcttgagtaagacagatcgccaagaatgatacgtcctcttaaatatgtccctgtcgtcatgacaactgctttcgcacgataatgtgcgcctgtttgtgtaataacgcctcggcattcgccgtcttcaacgatcagccgctccacaattccttgcagcaatgttaagtttggttctttttcaagcgtatttttcatttcgtgctgatattggaatttgtctgcttgcgcacgcaatgcacgaaccgcaggaccttttcctgtattcagcattctcatttgaatatgtgttttatcgatgtttcttcccatttctccgccgagcgcgtcaatttcgcggacgacaatcccttttgcggggccgccgacagacggattacatggcataaatgcaaccatatctaggttgatggtcaagacaagcgttttggcgccttggcgtgcagatgcgagggcagcctcaacaccggcatgcccggcgccaatcacaatcacatcgtattggcctgcttcataccccatgattctagttcctcctttaattattttcctaaacagaattgagaaaagagctgatcaattaagctttcgtggacagaatctccaatgatttcccctaaaagctcccagcatcttgtaaggtcaatttgcaccatgtcgatcgggacatcctgttcgatgccgctaagcgcatcttcaatggcgcgttttgcttgctgtaaaatagtgatgtgacgtgtgttgctgacataagtcagatcaccgctttcaatggcacccgtgtagaacagtgattgaatcgcttcttccagatcattgatgccttcctcttttaaaagagatgtcgtaacaactggacgtccattggcaagctcacggacacgttcagtgtcaatcttcggctcaaggtcagtcttattcaaaatcacgataacatccatgccctcaacggcttcaaaaagcttcacgtcttcttcagaaagctcttcactataattaagcacaagtaaaatcaggtccgcttcctttaggacctggcgagaacgttcaacaccgattcgctcaacaatatcctctgtttcacgaatacctgctgtatcaaccagacgaagcggaacgccccttacattcacgtattcctcaatcacatcccgtgtcgttccgggaatatcggttacaatggcttttgcctcatgaacgaggctgttcagaagagatgattttcctacgtttggccggccgataatgacggtagaaagaccttcacgcaagatttttccttgctcagaagtcctcagcagcgtctcaatttcctttttcacggcggttgccttttcgactaaaatctgatgcgtcatttcctctacatcatcatactccggataatcaatattcacctcaacatgggccagtgtttctaaaatctcactgcgcaaacggcgcaccaaagcagaaagacgcccttccatttgattcatagcaacgttcattgcccggtccgttttcgctctgattaagtccataaccgcttccgcctgtgaaagatcgattcggccgtttaaaaacgcacgtttcgtaaattcaccaggctctgccagtctcgctccctctctcaatgcaagctgaagcacttggttcacagtcacaattcccccgtgacagttaatctcgatgacatcttctcgtgtaaaagttctcggcgcttttaacactgataccattacttcctcaacgacacgatccgaaggtctgtctacgatatgaccataatgaatcgtatgtgattcgaccgagctgagtgttttccccttcggtcccttataaattttatctgcgatttgaatggcttctggtccgctcaaccgtacaatcgcaatcgcgccttctcccatcggtgtggaaattgccgcaattgtatccatgttgttcacctctctttacttatacttcatctatataaaaaaatttttattatgccaaaactaaaagataacatagtttggttcgaagtggaagatttgttatccacagaaatagaaattcgtcccttattactttaacttatccacatgtgaataacaattaattttatttcctgaacttcctttttatcaacaggatacacctaaaaagaaaaaacttaaacggcaaaaccttgatattactaggaaaagtagatttttcggatacaaaaaaaccgaaatccaatttttatcggacttcggttttatgctatcttttatgggaaataacgagatgacgattttcgccttcacccattgaatatgttttgatctggtggtttgcatatccagaaagagtatcgtgaataatttttctttcgctggacggcatgggctcaagctggatggattttttcgttttcaaaacctggtcagcaagcttgatggccagctggctcagtgtttcttttcttttcaaacgatagttttctgcatccaccgtcacatttttatattggcctggataacggttaagggcaagctgtgtcaaagtttcaagggcgtttaaagtttgtcctcttttcccaatcaacaatgctgccttttcacctgttatatgatatctcactgtctttttgctttcttgaacagtcacatcagacttcccggcaatggcttcggcaatcgtttgaagatataacttcgcttgctgaatcggatcaatcttttcaaccagctttacgatcgcaggctttttaccgaaaataccgagaaaccctttgtttccctcttcaataacagtaatttctaccttatccttcgttaatcccaactcttgcaatccggactgtactgcttcatcgacatttcgccctgcagcagtcacattcctcactttttctttcctccggctttttgcggctcaggattttttttaatatcaggtcctttaatgaggaaagtttgcgcaatcataaacaagttaccaactacccaataaagagaaagagccgccgggaagttgatcgcaaatacgataatcataattggcataatccaaagcatcatcgccatttgcggattttgctgcgcattgccagccatcatcagtttttgctgaacaaatgtagcgacaccggcaacgataggaagaatatagtaaggatctttttctcctaagtcaaaccataagaagctatgctctgaaatcgcctgggttctcatgatcgcatgatagaatccaattaaaatcggcatctggatcaaaatcgggaaacatcccgccaatggattgacaccatgcttttggaataaagccattgtttcctgttgaagcttttgctgcgttttttgatcctttgagctgtatttttctttaagcttttgcatttccggctgtaaagcctgcatcgctttcgaacttctcagctgcttaatcatcagcggtaaaattaataaacgaattaaaatggtaactagaataattgaaagcccgtagttatctcccgtcaatttcgctacatacgtaatgagctcagacaatggatatactacgtacttgtcccagaaatgcggactatctgcagtgatcggctctttcacactcgagcatccagccaaaagcatgaatacgccaaccatacttaatagcaaccctattctccttttcaacaacatttcctcctataattaatctttacactcttttattgcaaagcatacttgtatgtattttagcatctttcagttttaaatggtgtctttttctgatcaaccagaaaggaagcgcttttaaaagttgtaagaaagcagtggtgatgcctactttgacgaagatttcttatataatgaagactttctgaatagatgctgcagactttttttcgtttcctcatatgtcagctggctcgccggttttctggcaataatgatgtaatccttttccttcagtctctctttctcttcaagaaaggcctgccgaatcaaacgtttgatccgatttcgcatcacagcattgccaatttttttgctgacggaaagcccgacacgcagttcatcattttcaggctgatcaagcgtatataagacaaactggcggtttgcaactgatgtcccatgtttaaacactttttgaaaatcttcatttttctttaaacgatttcgcttcttcaaatgactcactccgatactggctggcagaaacttttaaaatttattatgaacatgagatgcatctgaaccaggaagcatgccccggttcattacgcatcacatctatcttttcccataacgtgaaaaaagaccactgacattattcagtggcctaagctgataatacttttctgcctttgcggcgacggcgtgctaaaactagacgaccgttttttgaactcatacggcttctgaagccatgaactttgctgcgtttacggttattcggttggaatgttcttttcatttatgacacctccctcgaggaatagctgttaaagacagtcttacttattatatttgcgttacctattcattgtcaacttcactagtgcttttatttcttgcaaccataataggataccataccttttcaactttcgaaaccttattttttagattccttaattttacggaaaaaagaca

SEQ ID NO: 3 - DNA, 1269 bp, Bacillus sp.
  misc_feature 1..1269: note = Bacillus isolate BB124 16S rRNA
  source 1..1269: mol_type = genomic DNA
acgatgcgtagccgacctgagagggtgatcggccacactgggactgagacacggcccagactcctacgggaggcagcagtagggaatcttccgcaatggacgaaagtctgacggagcaacgccgcgtgagtgatgaaggttttcggatcgtaaagctctgttgttagggaagaacaagtaccgttcgaatagggcggtaccttgacggtacctaaccagaaagccacggctaactacgtgccagcagccgcggtaatacgtaggtggcaagcgttgtccggaattattgggcgtaaagggctcgcaggcggtttcttaagtctgatgtgaaagcccccggctcaaccggggagggtcattggaaactggggaacttgagtgcagaagaggagagtggaattccacgtgtagcggtgaaatgcgtagagatgtggaggaacaccagtggcgaaggcgactctctggtctgtaactgacgctgaggagcgaaagcgtggggagcgaacaggattagataccctggtagtccacgccgtaaacgatgagtgctaagtgttagggggtttccgccccttagtgctgcagctaacgcattaagcactccgcctggggagtacggtcgcaagactgaaactcaaaggaattgacgggggcccgcacaagcggtggagcatgtggtttaattcgaagcaacgcgaagaaccttaccaggtcttgacatcctctgacaatcctagagataggacgtccccttcgggggcagagtgacaggtggtgcatggttgtcgtcagctcgtgtcgtgagatgttgggttaagtcccgcaacgagcgcaacccttgatcttagttgccagcattcagttgggcactctaaggtgactgccggtgacaaaccggaggaaggtggggatgacgtcaaatcatcatgccccttatgacctgggctacacacgtgctacaatggacagaacaaagggcagcgaaaccgcgaggttaagccaatcccacaaatctgttctcagttcggatcgcagtctgcaactcgactgcgtgaagctggaatcgctagtaatcgcggatcagcatgccgcggtgaatacgttcccgggccttgtacacaccgcccgtcacaccacgagagtttgtaacacccgaagtcggtgaggtaaccttttaggagccagccgccgaaggtgggacagatgattggggtgaagtcgtaacaaggtagccgtatcggaaggtgcggctggatcacctcctttcta

SEQ ID NO: 4 - DNA, 20 bp, synthetic construct
  misc_feature 1..20: note = Single strand DNA oligonucleotide
  source 1..20: mol_type = other DNA
ccgcagcaggtcgtattaaa

SEQ ID NO: 5 - DNA, 20 bp, synthetic construct
  misc_feature 1..20: note = Single strand DNA oligonucleotide
  source 1..20: mol_type = other DNA
ggtctcttcgtttggcttct

SEQ ID NO: 6 - DNA, 20 bp, synthetic construct
  misc_feature 1..20: note = Single strand DNA oligonucleotide
  source 1..20: mol_type = other DNA
cgtgtgccgaaggagaaata

SEQ ID NO: 7 - DNA, 21 bp, synthetic construct
  misc_feature 1..21: note = Single strand DNA oligonucleotide
  source 1..21: mol_type = other DNA
cgaatcgtacagacgggaaat

SEQ ID NO: 8 - DNA, 22 bp, synthetic construct
  misc_feature 1..22: note = Single strand DNA oligonucleotide
  source 1..22: mol_type = other DNA
gcgggcattacgaaagttattc

SEQ ID NO: 9 - DNA, 20 bp, synthetic construct
  misc_feature 1..20: note = Single strand DNA oligonucleotide
  source 1..20: mol_type = other DNA
ggcactgtccggtacataaa

SEQ ID NO: 10 - DNA, 20 bp, synthetic construct
  misc_feature 1..20: note = Single strand DNA oligonucleotide
  source 1..20: mol_type = other DNA
cgatggccaatgcgtttatg

SEQ ID NO: 11 - DNA, 18 bp, synthetic construct
  misc_feature 1..18: note = Single strand DNA oligonucleotide
  source 1..18: mol_type = other DNA
atgcagccgtctttccaa

SEQ ID NO: 12 - DNA, 21 bp, synthetic construct
  misc_feature 1..21: note = Single strand DNA oligonucleotide
  source 1..21: mol_type = other DNA
caggtgaagctgtttggaatg

SEQ ID NO: 13 - DNA, 20 bp, synthetic construct
  misc_feature 1..20: note = Single strand DNA oligonucleotide
  source 1..20: mol_type = other DNA
caggcgatttgaccgtatct

SEQ ID NO: 14 - DNA, 22 bp, synthetic construct
  misc_feature 1..22: note = Single strand DNA oligonucleotide
  source 1..22: mol_type = other DNA
cggtatgagtcgatgagaatcc

SEQ ID NO: 15 - DNA, 22 bp, synthetic construct
  misc_feature 1..22: note = Single strand DNA oligonucleotide
  source 1..22: mol_type = other DNA
ctgatatctgtgtgcccgatag

SEQ ID NO: 16 - DNA, 21 bp, synthetic construct
  misc_feature 1..21: note = Single strand DNA oligonucleotide
  source 1..21: mol_type = other DNA
ttctcccgaaaggcgaatatc

SEQ ID NO: 17 - DNA, 21 bp, synthetic construct
  misc_feature 1..21: note = Single strand DNA oligonucleotide
  source 1..21: mol_type = other DNA
ccgcttctaaagacgacatga

SEQ ID NO: 18 - DNA, 18 bp, synthetic construct
  misc_feature 1..18: note = Single strand DNA oligonucleotide
  source 1..18: mol_type = other DNA
gaattctggcggctaagg

SEQ ID NO: 19 - DNA, 21 bp, synthetic construct
  misc_feature 1..21: note = Single strand DNA oligonucleotide
  source 1..21: mol_type = other DNA
ggaaggaagtgctcggaataa
